United States Patent Application Publication US 2026/0015401 A1 - sequence listing, part 3

SEQ ID NO: 8043 - DNA, 1965 bp, synthetic construct
  source 1..1965: mol_type = other DNA
atggccttaccagtgaccgccttgctcctgccgctggccttgctgctccacgccgccaggccggcatgccgcagcgaggaccgctaccgcaaccccggtaccggcggaggcggatctggcggcggaggtagcggtggcggaggatctgaattcgacatccagatgacacagagccctagcagcctgtctgccagcgtgggagacagagtgaccatcacatgcaaggccagcgaccacatcaacaactggctggcctggtatcagcagaagcctggacaggcccctaagctgctgatctacggcgctaccacactggaaacaggcgtgcccagcagattttctggcagcggctctggcaccgactacaccctgacaatatccagcctccagcctgaggacttcgccacctactactgtcagcagagctggaacaccccttggacattcggccagggcaccaagctggaaatcaagagactcgaggacctgaagaacgtgttcccacctgaggtggccgtgttcgagcctagcgaggccgagatcagccacacccagaaagccaccctcgtgtgcctggctaccggcttctaccccgaccatgtggaactgtcttggtgggtcaacggcaaagaggtgcacagcggcgtgtgtaccgacccccagccactgaaagaacagcccgccctgaacgacagccggtactgcctgagcagcagactgagagtgtccgccaccttctggcagaacccccggaaccacttcagatgccaggtgcagttctacggcctgagcgagaacgacgagtggacccaggacagagccaagcccgtgacccagatcgtgtctgccgaagcctggggcagagccgattgcggctttaccagcgagagctaccagcagggcgtgctgagcgccaccatcctgtacgagatcctgctgggcaaggccaccctgtacgccgtgctggtgtctgccctggtgctgatggctatggtcaagcggaaggacagccggggaagggccaagcgatctggatctggagcaacaaacttctcactactcaaacaagcaggtgacgtggaggagaatcccgggcctactagtgccaccatggactggatttggcgcatccttttccttgtcggcgctgctaccggcgcccattccttcgaacaagttcagcttcaacagcctggcgctgagctggtcaaacctggcgcttctgtgaagatgagctgcaaagccagcggctacgccttcagcagctactggatcaactggatgaagcagaaacccggccagggactcgaatggatcggccaaatctatcccggcgacggcgacaccaactacaacggcaagttcaagggcagagccacactgaccgccgatacctctagcagcacagcctacatgcagctgagcagcctgaccagcgaagatagcgccgtgtacttctgtgcccggtccatcacaacagtcgtgggctgcgctatggactattggggccagggaacaagcgtgaccgtgtctagtacgcgtatccagaaccctgatcctgccgtgtaccagctgcgggatagcaagagcagcgacaagagcgtgtgtctgttcaccgacttcgacagccagaccaacgtgtcccagagcaaggactccgacgtgtacatcaccgataagtgcgtgctggacatgcggagcatggacttcaagagcaactccgccgtggcctggtccaacaagtccgatttcgcctgcgccaacgccttcaacaacagcattatccccgaggacacattcttcccaagccccgagagcagctgcgacgtgaagctggtggaaaagagcttcgagacagacaccaacctgaacttccagaacctgagcgtgatcggcttcagaatcctgctgctgaaagtggccggctttaacctgctgatgaccctgcggctgtggtccagctaa

SEQ ID NO: 8044 - DNA, 1968 bp, synthetic construct
  source 1..1968: mol_type = other DNA
atggccttaccagtgaccgccttgctcctgccgctggccttgctgctccacgccgccaggccggcatgccgcagcgaggaccgctaccgcaaccccaagggtaccggcggaggcggatctggcggcggaggtagcggtggcggaggatctgaattcgacatccagatgacacagagccctagcagcctgtctgccagcgtgggagacagagtgaccatcacatgcaaggccagcgaccacatcaacaactggctggcctggtatcagcagaagcctggacaggcccctaagctgctgatctacggcgctaccacactggaaacaggcgtgcccagcagattttctggcagcggctctggcaccgactacaccctgacaatatccagcctccagcctgaggacttcgccacctactactgtcagcagagctggaacaccccttggacattcggccagggcaccaagctggaaatcaagagactcgaggacctgaagaacgtgttcccacctgaggtggccgtgttcgagcctagcgaggccgagatcagccacacccagaaagccaccctcgtgtgcctggctaccggcttctaccccgaccatgtggaactgtcttggtgggtcaacggcaaagaggtgcacagcggcgtgtgtaccgacccccagccactgaaagaacagcccgccctgaacgacagccggtactgcctgagcagcagactgagagtgtccgccaccttctggcagaacccccggaaccacttcagatgccaggtgcagttctacggcctgagcgagaacgacgagtggacccaggacagagccaagcccgtgacccagatcgtgtctgccgaagcctggggcagagccgattgcggctttaccagcgagagctaccagcagggcgtgctgagcgccaccatcctgtacgagatcctgctgggcaaggccaccctgtacgccgtgctggtgtctgccctggtgctgatggctatggtcaagcggaaggacagccggggaagggccaagcgatctggatctggagcaacaaacttctcactactcaaacaagcaggtgacgtggaggagaatcccgggcctactagtgccaccatggactggatttggcgcatccttttccttgtcggcgctgctaccggcgcccattccttcgaacaagttcagcttcaacagcctggcgctgagctggtcaaacctggcgcttctgtgaagatgagctgcaaagccagcggctacgccttcagcagctactggatcaactggatgaagcagaaacccggccagggactcgaatggatcggccaaatctatcccggcgacggcgacaccaactacaacggcaagttcaagggcagagccacactgaccgccgatacctctagcagcacagcctacatgcagctgagcagcctgaccagcgaagatagcgccgtgtacttctgtgcccggtccatcacaacagtcgtgggctgcgctatggactattggggccagggaacaagcgtgaccgtgtctagtacgcgtatccagaaccctgatcctgccgtgtaccagctgcgggatagcaagagcagcgacaagagcgtgtgtctgttcaccgacttcgacagccagaccaacgtgtcccagagcaaggactccgacgtgtacatcaccgataagtgcgtgctggacatgcggagcatggacttcaagagcaactccgccgtggcctggtccaacaagtccgatttcgcctgcgccaacgccttcaacaacagcattatccccgaggacacattcttcccaagccccgagagcagctgcgacgtgaagctggtggaaaagagcttcgagacagacaccaacctgaacttccagaacctgagcgtgatcggcttcagaatcctgctgctgaaagtggccggctttaacctgctgatgaccctgcggctgtggtccagctaa

SEQ ID NO: 8045 - DNA, 1971 bp, synthetic construct
  source 1..1971: mol_type = other DNA
atggccttaccagtgaccgccttgctcctgccgctggccttgctgctccacgccgccaggccggcatgccgcagcgaggaccgctaccgcaaccccaagggcggtaccggcggaggcggatctggcggcggaggtagcggtggcggaggatctgaattcgacatccagatgacacagagccctagcagcctgtctgccagcgtgggagacagagtgaccatcacatgcaaggccagcgaccacatcaacaactggctggcctggtatcagcagaagcctggacaggcccctaagctgctgatctacggcgctaccacactggaaacaggcgtgcccagcagattttctggcagcggctctggcaccgactacaccctgacaatatccagcctccagcctgaggacttcgccacctactactgtcagcagagctggaacaccccttggacattcggccagggcaccaagctggaaatcaagagactcgaggacctgaagaacgtgttcccacctgaggtggccgtgttcgagcctagcgaggccgagatcagccacacccagaaagccaccctcgtgtgcctggctaccggcttctaccccgaccatgtggaactgtcttggtgggtcaacggcaaagaggtgcacagcggcgtgtgtaccgacccccagccactgaaagaacagcccgccctgaacgacagccggtactgcctgagcagcagactgagagtgtccgccaccttctggcagaacccccggaaccacttcagatgccaggtgcagttctacggcctgagcgagaacgacgagtggacccaggacagagccaagcccgtgacccagatcgtgtctgccgaagcctggggcagagccgattgcggctttaccagcgagagctaccagcagggcgtgctgagcgccaccatcctgtacgagatcctgctgggcaaggccaccctgtacgccgtgctggtgtctgccctggtgctgatggctatggtcaagcggaaggacagccggggaagggccaagcgatctggatctggagcaacaaacttctcactactcaaacaagcaggtgacgtggaggagaatcccgggcctactagtgccaccatggactggatttggcgcatccttttccttgtcggcgctgctaccggcgcccattccttcgaacaagttcagcttcaacagcctggcgctgagctggtcaaacctggcgcttctgtgaagatgagctgcaaagccagcggctacgccttcagcagctactggatcaactggatgaagcagaaacccggccagggactcgaatggatcggccaaatctatcccggcgacggcgacaccaactacaacggcaagttcaagggcagagccacactgaccgccgatacctctagcagcacagcctacatgcagctgagcagcctgaccagcgaagatagcgccgtgtacttctgtgcccggtccatcacaacagtcgtgggctgcgctatggactattggggccagggaacaagcgtgaccgtgtctagtacgcgtatccagaaccctgatcctgccgtgtaccagctgcgggatagcaagagcagcgacaagagcgtgtgtctgttcaccgacttcgacagccagaccaacgtgtcccagagcaaggactccgacgtgtacatcaccgataagtgcgtgctggacatgcggagcatggacttcaagagcaactccgccgtggcctggtccaacaagtccgatttcgcctgcgccaacgccttcaacaacagcattatccccgaggacacattcttcccaagccccgagagcagctgcgacgtgaagctggtggaaaagagcttcgagacagacaccaacctgaacttccagaacctgagcgtgatcggcttcagaatcctgctgctgaaagtggccggctttaacctgctgatgaccctgcggctgtggtccagctaa

SEQ ID NO: 8046 - DNA, 1974 bp, synthetic construct
  source 1..1974: mol_type = other DNA
atggccttaccagtgaccgccttgctcctgccgctggccttgctgctccacgccgccaggccggcatgccgcagcgaggaccgctaccgcaaccccaagggcagcggtaccggcggaggcggatctggcggcggaggtagcggtggcggaggatctgaattcgacatccagatgacacagagccctagcagcctgtctgccagcgtgggagacagagtgaccatcacatgcaaggccagcgaccacatcaacaactggctggcctggtatcagcagaagcctggacaggcccctaagctgctgatctacggcgctaccacactggaaacaggcgtgcccagcagattttctggcagcggctctggcaccgactacaccctgacaatatccagcctccagcctgaggacttcgccacctactactgtcagcagagctggaacaccccttggacattcggccagggcaccaagctggaaatcaagagactcgaggacctgaagaacgtgttcccacctgaggtggccgtgttcgagcctagcgaggccgagatcagccacacccagaaagccaccctcgtgtgcctggctaccggcttctaccccgaccatgtggaactgtcttggtgggtcaacggcaaagaggtgcacagcggcgtgtgtaccgacccccagccactgaaagaacagcccgccctgaacgacagccggtactgcctgagcagcagactgagagtgtccgccaccttctggcagaacccccggaaccacttcagatgccaggtgcagttctacggcctgagcgagaacgacgagtggacccaggacagagccaagcccgtgacccagatcgtgtctgccgaagcctggggcagagccgattgcggctttaccagcgagagctaccagcagggcgtgctgagcgccaccatcctgtacgagatcctgctgggcaaggccaccctgtacgccgtgctggtgtctgccctggtgctgatggctatggtcaagcggaaggacagccggggaagggccaagcgatctggatctggagcaacaaacttctcactactcaaacaagcaggtgacgtggaggagaatcccgggcctactagtgccaccatggactggatttggcgcatccttttccttgtcggcgctgctaccggcgcccattccttcgaacaagttcagcttcaacagcctggcgctgagctggtcaaacctggcgcttctgtgaagatgagctgcaaagccagcggctacgccttcagcagctactggatcaactggatgaagcagaaacccggccagggactcgaatggatcggccaaatctatcccggcgacggcgacaccaactacaacggcaagttcaagggcagagccacactgaccgccgatacctctagcagcacagcctacatgcagctgagcagcctgaccagcgaagatagcgccgtgtacttctgtgcccggtccatcacaacagtcgtgggctgcgctatggactattggggccagggaacaagcgtgaccgtgtctagtacgcgtatccagaaccctgatcctgccgtgtaccagctgcgggatagcaagagcagcgacaagagcgtgtgtctgttcaccgacttcgacagccagaccaacgtgtcccagagcaaggactccgacgtgtacatcaccgataagtgcgtgctggacatgcggagcatggacttcaagagcaactccgccgtggcctggtccaacaagtccgatttcgcctgcgccaacgccttcaacaacagcattatccccgaggacacattcttcccaagccccgagagcagctgcgacgtgaagctggtggaaaagagcttcgagacagacaccaacctgaacttccagaacctgagcgtgatcggcttcagaatcctgctgctgaaagtggccggctttaacctgctgatgaccctgcggctgtggtccagctaa

SEQ ID NO: 8047 - DNA, 1977 bp, synthetic construct
  source 1..1977: mol_type = other DNA
atggccttaccagtgaccgccttgctcctgccgctggccttgctgctccacgccgccaggccggcatgccgcagcgaggaccgctaccgcaaccccaagggcagcgccggtaccggcggaggcggatctggcggcggaggtagcggtggcggaggatctgaattcgacatccagatgacacagagccctagcagcctgtctgccagcgtgggagacagagtgaccatcacatgcaaggccagcgaccacatcaacaactggctggcctggtatcagcagaagcctggacaggcccctaagctgctgatctacggcgctaccacactggaaacaggcgtgcccagcagattttctggcagcggctctggcaccgactacaccctgacaatatccagcctccagcctgaggacttcgccacctactactgtcagcagagctggaacaccccttggacattcggccagggcaccaagctggaaatcaagagactcgaggacctgaagaacgtgttcccacctgaggtggccgtgttcgagcctagcgaggccgagatcagccacacccagaaagccaccctcgtgtgcctggctaccggcttctaccccgaccatgtggaactgtcttggtgggtcaacggcaaagaggtgcacagcggcgtgtgtaccgacccccagccactgaaagaacagcccgccctgaacgacagccggtactgcctgagcagcagactgagagtgtccgccaccttctggcagaacccccggaaccacttcagatgccaggtgcagttctacggcctgagcgagaacgacgagtggacccaggacagagccaagcccgtgacccagatcgtgtctgccgaagcctggggcagagccgattgcggctttaccagcgagagctaccagcagggcgtgctgagcgccaccatcctgtacgagatcctgctgggcaaggccaccctgtacgccgtgctggtgtctgccctggtgctgatggctatggtcaagcggaaggacagccggggaagggccaagcgatctggatctggagcaacaaacttctcactactcaaacaagcaggtgacgtggaggagaatcccgggcctactagtgccaccatggactggatttggcgcatccttttccttgtcggcgctgctaccggcgcccattccttcgaacaagttcagcttcaacagcctggcgctgagctggtcaaacctggcgcttctgtgaagatgagctgcaaagccagcggctacgccttcagcagctactggatcaactggatgaagcagaaacccggccagggactcgaatggatcggccaaatctatcccggcgacggcgacaccaactacaacggcaagttcaagggcagagccacactgaccgccgatacctctagcagcacagcctacatgcagctgagcagcctgaccagcgaagatagcgccgtgtacttctgtgcccggtccatcacaacagtcgtgggctgcgctatggactattggggccagggaacaagcgtgaccgtgtctagtacgcgtatccagaaccctgatcctgccgtgtaccagctgcgggatagcaagagcagcgacaagagcgtgtgtctgttcaccgacttcgacagccagaccaacgtgtcccagagcaaggactccgacgtgtacatcaccgataagtgcgtgctggacatgcggagcatggacttcaagagcaactccgccgtggcctggtccaacaagtccgatttcgcctgcgccaacgccttcaacaacagcattatccccgaggacacattcttcccaagccccgagagcagctgcgacgtgaagctggtggaaaagagcttcgagacagacaccaacctgaacttccagaacctgagcgtgatcggcttcagaatcctgctgctgaaagtggccggctttaacctgctgatgaccctgcggctgtggtccagctaa

SEQ ID NO: 8048 - DNA, 1980 bp, synthetic construct
  source 1..1980: mol_type = other DNA
atggccttaccagtgaccgccttgctcctgccgctggccttgctgctccacgccgccaggccggcatgccgcagcgaggaccgctaccgcaaccccaagggcagcgcctgcggtaccggcggaggcggatctggcggcggaggtagcggtggcggaggatctgaattcgacatccagatgacacagagccctagcagcctgtctgccagcgtgggagacagagtgaccatcacatgcaaggccagcgaccacatcaacaactggctggcctggtatcagcagaagcctggacaggcccctaagctgctgatctacggcgctaccacactggaaacaggcgtgcccagcagattttctggcagcggctctggcaccgactacaccctgacaatatccagcctccagcctgaggacttcgccacctactactgtcagcagagctggaacaccccttggacattcggccagggcaccaagctggaaatcaagagactcgaggacctgaagaacgtgttcccacctgaggtggccgtgttcgagcctagcgaggccgagatcagccacacccagaaagccaccctcgtgtgcctggctaccggcttctaccccgaccatgtggaactgtcttggtgggtcaacggcaaagaggtgcacagcggcgtgtgtaccgacccccagccactgaaagaacagcccgccctgaacgacagccggtactgcctgagcagcagactgagagtgtccgccaccttctggcagaacccccggaaccacttcagatgccaggtgcagttctacggcctgagcgagaacgacgagtggacccaggacagagccaagcccgtgacccagatcgtgtctgccgaagcctggggcagagccgattgcggctttaccagcgagagctaccagcagggcgtgctgagcgccaccatcctgtacgagatcctgctgggcaaggccaccctgtacgccgtgctggtgtctgccctggtgctgatggctatggtcaagcggaaggacagccggggaagggccaagcgatctggatctggagcaacaaacttctcactactcaaacaagcaggtgacgtggaggagaatcccgggcctactagtgccaccatggactggatttggcgcatccttttccttgtcggcgctgctaccggcgcccattccttcgaacaagttcagcttcaacagcctggcgctgagctggtcaaacctggcgcttctgtgaagatgagctgcaaagccagcggctacgccttcagcagctactggatcaactggatgaagcagaaacccggccagggactcgaatggatcggccaaatctatcccggcgacggcgacaccaactacaacggcaagttcaagggcagagccacactgaccgccgatacctctagcagcacagcctacatgcagctgagcagcctgaccagcgaagatagcgccgtgtacttctgtgcccggtccatcacaacagtcgtgggctgcgctatggactattggggccagggaacaagcgtgaccgtgtctagtacgcgtatccagaaccctgatcctgccgtgtaccagctgcgggatagcaagagcagcgacaagagcgtgtgtctgttcaccgacttcgacagccagaccaacgtgtcccagagcaaggactccgacgtgtacatcaccgataagtgcgtgctggacatgcggagcatggacttcaagagcaactccgccgtggcctggtccaacaagtccgatttcgcctgcgccaacgccttcaacaacagcattatccccgaggacacattcttcccaagccccgagagcagctgcgacgtgaagctggtggaaaagagcttcgagacagacaccaacctgaacttccagaacctgagcgtgatcggcttcagaatcctgctgctgaaagtggccggctttaacctgctgatgaccctgcggctgtggtccagctaa

SEQ ID NO: 8049 - DNA, 1983 bp, synthetic construct
  source 1..1983: mol_type = other DNA
atggccttaccagtgaccgccttgctcctgccgctggccttgctgctccacgccgccaggccggcatgccgcagcgaggaccgctaccgcaaccccaagggcagcgcctgcaagggtaccggcggaggcggatctggcggcggaggtagcggtggcggaggatctgaattcgacatccagatgacacagagccctagcagcctgtctgccagcgtgggagacagagtgaccatcacatgcaaggccagcgaccacatcaacaactggctggcctggtatcagcagaagcctggacaggcccctaagctgctgatctacggcgctaccacactggaaacaggcgtgcccagcagattttctggcagcggctctggcaccgactacaccctgacaatatccagcctccagcctgaggacttcgccacctactactgtcagcagagctggaacaccccttggacattcggccagggcaccaagctggaaatcaagagactcgaggacctgaagaacgtgttcccacctgaggtggccgtgttcgagcctagcgaggccgagatcagccacacccagaaagccaccctcgtgtgcctggctaccggcttctaccccgaccatgtggaactgtcttggtgggtcaacggcaaagaggtgcacagcggcgtgtgtaccgacccccagccactgaaagaacagcccgccctgaacgacagccggtactgcctgagcagcagactgagagtgtccgccaccttctggcagaacccccggaaccacttcagatgccaggtgcagttctacggcctgagcgagaacgacgagtggacccaggacagagccaagcccgtgacccagatcgtgtctgccgaagcctggggcagagccgattgcggctttaccagcgagagctaccagcagggcgtgctgagcgccaccatcctgtacgagatcctgctgggcaaggccaccctgtacgccgtgctggtgtctgccctggtgctgatggctatggtcaagcggaaggacagccggggaagggccaagcgatctggatctggagcaacaaacttctcactactcaaacaagcaggtgacgtggaggagaatcccgggcctactagtgccaccatggactggatttggcgcatccttttccttgtcggcgctgctaccggcgcccattccttcgaacaagttcagcttcaacagcctggcgctgagctggtcaaacctggcgcttctgtgaagatgagctgcaaagccagcggctacgccttcagcagctactggatcaactggatgaagcagaaacccggccagggactcgaatggatcggccaaatctatcccggcgacggcgacaccaactacaacggcaagttcaagggcagagccacactgaccgccgatacctctagcagcacagcctacatgcagctgagcagcctgaccagcgaagatagcgccgtgtacttctgtgcccggtccatcacaacagtcgtgggctgcgctatggactattggggccagggaacaagcgtgaccgtgtctagtacgcgtatccagaaccctgatcctgccgtgtaccagctgcgggatagcaagagcagcgacaagagcgtgtgtctgttcaccgacttcgacagccagaccaacgtgtcccagagcaaggactccgacgtgtacatcaccgataagtgcgtgctggacatgcggagcatggacttcaagagcaactccgccgtggcctggtccaacaagtccgatttcgcctgcgccaacgccttcaacaacagcattatccccgaggacacattcttcccaagccccgagagcagctgcgacgtgaagctggtggaaaagagcttcgagacagacaccaacctgaacttccagaacctgagcgtgatcggcttcagaatcctgctgctgaaagtggccggctttaacctgctgatgaccctgcggctgtggtccagctaa

SEQ ID NO: 8050 - DNA, 1983 bp, synthetic construct
  source 1..1983: mol_type = other DNA
atggccttaccagtgaccgccttgctcctgccgctggccttgctgctccacgccgccaggccggcatgccgcagcgaggaccgctaccgcaaccccaagggcagcgcctgcagcggtaccggcggaggcggatctggcggcggaggtagcggtggcggaggatctgaattcgacatccagatgacacagagccctagcagcctgtctgccagcgtgggagacagagtgaccatcacatgcaaggccagcgaccacatcaacaactggctggcctggtatcagcagaagcctggacaggcccctaagctgctgatctacggcgctaccacactggaaacaggcgtgcccagcagattttctggcagcggctctggcaccgactacaccctgacaatatccagcctccagcctgaggacttcgccacctactactgtcagcagagctggaacaccccttggacattcggccagggcaccaagctggaaatcaagagactcgaggacctgaagaacgtgttcccacctgaggtggccgtgttcgagcctagcgaggccgagatcagccacacccagaaagccaccctcgtgtgcctggctaccggcttctaccccgaccatgtggaactgtcttggtgggtcaacggcaaagaggtgcacagcggcgtgtgtaccgacccccagccactgaaagaacagcccgccctgaacgacagccggtactgcctgagcagcagactgagagtgtccgccaccttctggcagaacccccggaaccacttcagatgccaggtgcagttctacggcctgagcgagaacgacgagtggacccaggacagagccaagcccgtgacccagatcgtgtctgccgaagcctggggcagagccgattgcggctttaccagcgagagctaccagcagggcgtgctgagcgccaccatcctgtacgagatcctgctgggcaaggccaccctgtacgccgtgctggtgtctgccctggtgctgatggctatggtcaagcggaaggacagccggggaagggccaagcgatctggatctggagcaacaaacttctcactactcaaacaagcaggtgacgtggaggagaatcccgggcctactagtgccaccatggactggatttggcgcatccttttccttgtcggcgctgctaccggcgcccattccttcgaacaagttcagcttcaacagcctggcgctgagctggtcaaacctggcgcttctgtgaagatgagctgcaaagccagcggctacgccttcagcagctactggatcaactggatgaagcagaaacccggccagggactcgaatggatcggccaaatctatcccggcgacggcgacaccaactacaacggcaagttcaagggcagagccacactgaccgccgatacctctagcagcacagcctacatgcagctgagcagcctgaccagcgaagatagcgccgtgtacttctgtgcccggtccatcacaacagtcgtgggctgcgctatggactattggggccagggaacaagcgtgaccgtgtctagtacgcgtatccagaaccctgatcctgccgtgtaccagctgcgggatagcaagagcagcgacaagagcgtgtgtctgttcaccgacttcgacagccagaccaacgtgtcccagagcaaggactccgacgtgtacatcaccgataagtgcgtgctggacatgcggagcatggacttcaagagcaactccgccgtggcctggtccaacaagtccgatttcgcctgcgccaacgccttcaacaacagcattatccccgaggacacattcttcccaagccccgagagcagctgcgacgtgaagctggtggaaaagagcttcgagacagacaccaacctgaacttccagaacctgagcgtgatcggcttcagaatcctgctgctgaaagtggccggctttaacctgctgatgaccctgcggctgtggtccagctaa

SEQ ID NO: 8051 - DNA, 1956 bp, synthetic construct
  source 1..1956: mol_type = other DNA
atggccttaccagtgaccgccttgctcctgccgctggccttgctgctccacgccgccaggccggcatgccgcagcgaggaccactacggtaccggcggaggcggatctggcggcggaggtagcggtggcggaggatctgaattcgacatccagatgacacagagccctagcagcctgtctgccagcgtgggagacagagtgaccatcacatgcaaggccagcgaccacatcaacaactggctggcctggtatcagcagaagcctggacaggcccctaagctgctgatctacggcgctaccacactggaaacaggcgtgcccagcagattttctggcagcggctctggcaccgactacaccctgacaatatccagcctccagcctgaggacttcgccacctactactgtcagcagagctggaacaccccttggacattcggccagggcaccaagctggaaatcaagagactcgaggacctgaagaacgtgttcccacctgaggtggccgtgttcgagcctagcgaggccgagatcagccacacccagaaagccaccctcgtgtgcctggctaccggcttctaccccgaccatgtggaactgtcttggtgggtcaacggcaaagaggtgcacagcggcgtgtgtaccgacccccagccactgaaagaacagcccgccctgaacgacagccggtactgcctgagcagcagactgagagtgtccgccaccttctggcagaacccccggaaccacttcagatgccaggtgcagttctacggcctgagcgagaacgacgagtggacccaggacagagccaagcccgtgacccagatcgtgtctgccgaagcctggggcagagccgattgcggctttaccagcgagagctaccagcagggcgtgctgagcgccaccatcctgtacgagatcctgctgggcaaggccaccctgtacgccgtgctggtgtctgccctggtgctgatggctatggtcaagcggaaggacagccggggaagggccaagcgatctggatctggagcaacaaacttctcactactcaaacaagcaggtgacgtggaggagaatcccgggcctactagtgccaccatggactggatttggcgcatccttttccttgtcggcgctgctaccggcgcccattccttcgaacaagttcagcttcaacagcctggcgctgagctggtcaaacctggcgcttctgtgaagatgagctgcaaagccagcggctacgccttcagcagctactggatcaactggatgaagcagaaacccggccagggactcgaatggatcggccaaatctatcccggcgacggcgacaccaactacaacggcaagttcaagggcagagccacactgaccgccgatacctctagcagcacagcctacatgcagctgagcagcctgaccagcgaagatagcgccgtgtacttctgtgcccggtccatcacaacagtcgtgggctgcgctatggactattggggccagggaacaagcgtgaccgtgtctagtacgcgtatccagaaccctgatcctgccgtgtaccagctgcgggatagcaagagcagcgacaagagcgtgtgtctgttcaccgacttcgacagccagaccaacgtgtcccagagcaaggactccgacgtgtacatcaccgataagtgcgtgctggacatgcggagcatggacttcaagagcaactccgccgtggcctggtccaacaagtccgatttcgcctgcgccaacgccttcaacaacagcattatccccgaggacacattcttcccaagccccgagagcagctgcgacgtgaagctggtggaaaagagcttcgagacagacaccaacctgaacttccagaacctgagcgtgatcggcttcagaatcctgctgctgaaagtggccggctttaacctgctgatgaccctgcggctgtggtccagctaa

SEQ ID NO: 8052 - DNA, 1956 bp, synthetic construct
  source 1..1956: mol_type = other DNA
atggccttaccagtgaccgccttgctcctgccgctggccttgctgctccacgccgccaggccggcatgccgcagcgagagccgctacggtaccggcggaggcggatctggcggcggaggtagcggtggcggaggatctgaattcgacatccagatgacacagagccctagcagcctgtctgccagcgtgggagacagagtgaccatcacatgcaaggccagcgaccacatcaacaactggctggcctggtatcagcagaagcctggacaggcccctaagctgctgatctacggcgctaccacactggaaacaggcgtgcccagcagattttctggcagcggctctggcaccgactacaccctgacaatatccagcctccagcctgaggacttcgccacctactactgtcagcagagctggaacaccccttggacattcggccagggcaccaagctggaaatcaagagactcgaggacctgaagaacgtgttcccacctgaggtggccgtgttcgagcctagcgaggccgagatcagccacacccagaaagccaccctcgtgtgcctggctaccggcttctaccccgaccatgtggaactgtcttggtgggtcaacggcaaagaggtgcacagcggcgtgtgtaccgacccccagccactgaaagaacagcccgccctgaacgacagccggtactgcctgagcagcagactgagagtgtccgccaccttctggcagaacccccggaaccacttcagatgccaggtgcagttctacggcctgagcgagaacgacgagtggacccaggacagagccaagcccgtgacccagatcgtgtctgccgaagcctggggcagagccgattgcggctttaccagcgagagctaccagcagggcgtgctgagcgccaccatcctgtacgagatcctgctgggcaaggccaccctgtacgccgtgctggtgtctgccctggtgctgatggctatggtcaagcggaaggacagccggggaagggccaagcgatctggatctggagcaacaaacttctcactactcaaacaagcaggtgacgtggaggagaatcccgggcctactagtgccaccatggactggatttggcgcatccttttccttgtcggcgctgctaccggcgcccattccttcgaacaagttcagcttcaacagcctggcgctgagctggtcaaacctggcgcttctgtgaagatgagctgcaaagccagcggctacgccttcagcagctactggatcaactggatgaagcagaaacccggccagggactcgaatggatcggccaaatctatcccggcgacggcgacaccaactacaacggcaagttcaagggcagagccacactgaccgccgatacctctagcagcacagcctacatgcagctgagcagcctgaccagcgaagatagcgccgtgtacttctgtgcccggtccatcacaacagtcgtgggctgcgctatggactattggggccagggaacaagcgtgaccgtgtctagtacgcgtatccagaaccctgatcctgccgtgtaccagctgcgggatagcaagagcagcgacaagagcgtgtgtctgttcaccgacttcgacagccagaccaacgtgtcccagagcaaggactccgacgtgtacatcaccgataagtgcgtgctggacatgcggagcatggacttcaagagcaactccgccgtggcctggtccaacaagtccgatttcgcctgcgccaacgccttcaacaacagcattatccccgaggacacattcttcccaagccccgagagcagctgcgacgtgaagctggtggaaaagagcttcgagacagacaccaacctgaacttccagaacctgagcgtgatcggcttcagaatcctgctgctgaaagtggccggctttaacctgctgatgaccctgcggctgtggtccagctaa

SEQ ID NO: 8053 - DNA, 1956 bp, synthetic construct
  source 1..1956: mol_type = other DNA
atggccttaccagtgaccgccttgctcctgccgctggccttgctgctccacgccgccaggccggcatgccgcagcgagaaccgctacggtaccggcggaggcggatctggcggcggaggtagcggtggcggaggatctgaattcgacatccagatgacacagagccctagcagcctgtctgccagcgtgggagacagagtgaccatcacatgcaaggccagcgaccacatcaacaactggctggcctggtatcagcagaagcctggacaggcccctaagctgctgatctacggcgctaccacactggaaacaggcgtgcccagcagattttctggcagcggctctggcaccgactacaccctgacaatatccagcctccagcctgaggacttcgccacctactactgtcagcagagctggaacaccccttggacattcggccagggcaccaagctggaaatcaagagactcgaggacctgaagaacgtgttcccacctgaggtggccgtgttcgagcctagcgaggccgagatcagccacacccagaaagccaccctcgtgtgcctggctaccggcttctaccccgaccatgtggaactgtcttggtgggtcaacggcaaagaggtgcacagcggcgtgtgtaccgacccccagccactgaaagaacagcccgccctgaacgacagccggtactgcctgagcagcagactgagagtgtccgccaccttctggcagaacccccggaaccacttcagatgccaggtgcagttctacggcctgagcgagaacgacgagtggacccaggacagagccaagcccgtgacccagatcgtgtctgccgaagcctggggcagagccgattgcggctttaccagcgagagctaccagcagggcgtgctgagcgccaccatcctgtacgagatcctgctgggcaaggccaccctgtacgccgtgctggtgtctgccctggtgctgatggctatggtcaagcggaaggacagccggggaagggccaagcgatctggatctggagcaacaaacttctcactactcaaacaagcaggtgacgtggaggagaatcccgggcctactagtgccaccatggactggatttggcgcatccttttccttgtcggcgctgctaccggcgcccattccttcgaacaagttcagcttcaacagcctggcgctgagctggtcaaacctggcgcttctgtgaagatgagctgcaaagccagcggctacgccttcagcagctactggatcaactggatgaagcagaaacccggccagggactcgaatggatcggccaaatctatcccggcgacggcgacaccaactacaacggcaagttcaagggcagagccacactgaccgccgatacctctagcagcacagcctacatgcagctgagcagcctgaccagcgaagatagcgccgtgtacttctgtgcccggtccatcacaacagtcgtgggctgcgctatggactattggggccagggaacaagcgtgaccgtgtctagtacgcgtatccagaaccctgatcctgccgtgtaccagctgcgggatagcaagagcagcgacaagagcgtgtgtctgttcaccgacttcgacagccagaccaacgtgtcccagagcaaggactccgacgtgtacatcaccgataagtgcgtgctggacatgcggagcatggacttcaagagcaactccgccgtggcctggtccaacaagtccgatttcgcctgcgccaacgccttcaacaacagcattatccccgaggacacattcttcccaagccccgagagcagctgcgacgtgaagctggtggaaaagagcttcgagacagacaccaacctgaacttccagaacctgagcgtgatcggcttcagaatcctgctgctgaaagtggccggctttaacctgctgatgaccctgcggctgtggtccagctaa

SEQ ID NO: 8054 - DNA, 1956 bp, synthetic construct
  source 1..1956: mol_type = other DNA
atggccttaccagtgaccgccttgctcctgccgctggccttgctgctccacgccgccaggccggcatgccgcagcgagggccgctacggtaccggcggaggcggatctggcggcggaggtagcggtggcggaggatctgaattcgacatccagatgacacagagccctagcagcctgtctgccagcgtgggagacagagtgaccatcacatgcaaggccagcgaccacatcaacaactggctggcctggtatcagcagaagcctggacaggcccctaagctgctgatctacggcgctaccacactggaaacaggcgtgcccagcagattttctggcagcggctctggcaccgactacaccctgacaatatccagcctccagcctgaggacttcgccacctactactgtcagcagagctggaacaccccttggacattcggccagggcaccaagctggaaatcaagagactcgaggacctgaagaacgtgttcccacctgaggtggccgtgttcgagcctagcgaggccgagatcagccacacccagaaagccaccctcgtgtgcctggctaccggcttctaccccgaccatgtggaactgtcttggtgggtcaacggcaaagaggtgcacagcggcgtgtgtaccgacccccagccactgaaagaacagcccgccctgaacgacagccggtactgcctgagcagcagactgagagtgtccgccaccttctggcagaacccccggaaccacttcagatgccaggtgcagttctacggcctgagcgagaacgacgagtggacccaggacagagccaagcccgtgacccagatcgtgtctgccgaagcctggggcagagccgattgcggctttaccagcgagagctaccagcagggcgtgctgagcgccaccatcctgtacgagatcctgctgggcaaggccaccctgtacgccgtgctggtgtctgccctggtgctgatggctatggtcaagcggaaggacagccggggaagggccaagcgatctggatctggagcaacaaacttctcactactcaaacaagcaggtgacgtggaggagaatcccgggcctactagtgccaccatggactggatttggcgcatccttttccttgtcggcgctgctaccggcgcccattccttcgaacaagttcagcttcaacagcctggcgctgagctggtcaaacctggcgcttctgtgaagatgagctgcaaagccagcggctacgccttcagcagctactggatcaactggatgaagcagaaacccggccagggactcgaatggatcggccaaatctatcccggcgacggcgacaccaactacaacggcaagttcaagggcagagccacactgaccgccgatacctctagcagcacagcctacatgcagctgagcagcctgaccagcgaagatagcgccgtgtacttctgtgcccggtccatcacaacagtcgtgggctgcgctatggactattggggccagggaacaagcgtgaccgtgtctagtacgcgtatccagaaccctgatcctgccgtgtaccagctgcgggatagcaagagcagcgacaagagcgtgtgtctgttcaccgacttcgacagccagaccaacgtgtcccagagcaaggactccgacgtgtacatcaccgataagtgcgtgctggacatgcggagcatggacttcaagagcaactccgccgtggcctggtccaacaagtccgatttcgcctgcgccaacgccttcaacaacagcattatccccgaggacacattcttcccaagccccgagagcagctgcgacgtgaagctggtggaaaagagcttcgagacagacaccaacctgaacttccagaacctgagcgtgatcggcttcagaatcctgctgctgaaagtggccggctttaacctgctgatgaccctgcggctgtggtccagctaa

SEQ ID NO: 8055 - DNA, 1956 bp, synthetic construct
  source 1..1956: mol_type = other DNA
atggccttaccagtgaccgccttgctcctgccgctggccttgctgctccacgccgccaggccggcatgccgcagcgaggcccgctacggtaccggcggaggcggatctggcggcggaggtagcggtggcggaggatctgaattcgacatccagatgacacagagccctagcagcctgtctgccagcgtgggagacagagtgaccatcacatgcaaggccagcgaccacatcaacaactggctggcctggtatcagcagaagcctggacaggcccctaagctgctgatctacggcgctaccacactggaaacaggcgtgcccagcagattttctggcagcggctctggcaccgactacaccctgacaatatccagcctccagcctgaggacttcgccacctactactgtcagcagagctggaacaccccttggacattcggccagggcaccaagctggaaatcaagagactcgaggacctgaagaacgtgttcccacctgaggtggccgtgttcgagcctagcgaggccgagatcagccacacccagaaagccaccctcgtgtgcctggctaccggcttctaccccgaccatgtggaactgtcttggtgggtcaacggcaaagaggtgcacagcggcgtgtgtaccgacccccagccactgaaagaacagcccgccctgaacgacagccggtactgcctgagcagcagactgagagtgtccgccaccttctggcagaacccccggaaccacttcagatgccaggtgcagttctacggcctgagcgagaacgacgagtggacccaggacagagccaagcccgtgacccagatcgtgtctgccgaagcctggggcagagccgattgcggctttaccagcgagagctaccagcagggcgtgctgagcgccaccatcctgtacgagatcctgctgggcaaggccaccctgtacgccgtgctggtgtctgccctggtgctgatggctatggtcaagcggaaggacagccggggaagggccaagcgatctggatctggagcaacaaacttctcactactcaaacaagcaggtgacgtggaggagaatcccgggcctactagtgccaccatggactggatttggcgcatccttttccttgtcggcgctgctaccggcgcccattccttcgaacaagttcagcttcaacagcctggcgctgagctggtcaaacctggcgcttctgtgaagatgagctgcaaagccagcggctacgccttcagcagctactggatcaactggatgaagcagaaacccggccagggactcgaatggatcggccaaatctatcccggcgacggcgacaccaactacaacggcaagttcaagggcagagccacactgaccgccgatacctctagcagcacagcctacatgcagctgagcagcctgaccagcgaagatagcgccgtgtacttctgtgcccggtccatcacaacagtcgtgggctgcgctatggactattggggccagggaacaagcgtgaccgtgtctagtacgcgtatccagaaccctgatcctgccgtgtaccagctgcgggatagcaagagcagcgacaagagcgtgtgtctgttcaccgacttcgacagccagaccaacgtgtcccagagcaaggactccgacgtgtacatcaccgataagtgcgtgctggacatgcggagcatggacttcaagagcaactccgccgtggcctggtccaacaagtccgatttcgcctgcgccaacgccttcaacaacagcattatccccgaggacacattcttcccaagccccgagagcagctgcgacgtgaagctggtggaaaagagcttcgagacagacaccaacctgaacttccagaacctgagcgtgatcggcttcagaatcctgctgctgaaagtggccggctttaacctgctgatgaccctgcggctgtggtccagctaa

SEQ ID NO: 8056 - DNA, 1956 bp, synthetic construct
  source 1..1956: mol_type = other DNA
atggccttaccagtgaccgccttgctcctgccgctggccttgctgctccacgccgccaggccggcatgccgcagcgagcagcgctacggtaccggcggaggcggatctggcggcggaggtagcggtggcggaggatctgaattcgacatccagatgacacagagccctagcagcctgtctgccagcgtgggagacagagtgaccatcacatgcaaggccagcgaccacatcaacaactggctggcctggtatcagcagaagcctggacaggcccctaagctgctgatctacggcgctaccacactggaaacaggcgtgcccagcagattttctggcagcggctctggcaccgactacaccctgacaatatccagcctccagcctgaggacttcgccacctactactgtcagcagagctggaacaccccttggacattcggccagggcaccaagctggaaatcaagagactcgaggacctgaagaacgtgttcccacctgaggtggccgtgttcgagcctagcgaggccgagatcagccacacccagaaagccaccctcgtgtgcctggctaccggcttctaccccgaccatgtggaactgtcttggtgggtcaacggcaaagaggtgcacagcggcgtgtgtaccgacccccagccactgaaagaacagcccgccctgaacgacagccggtactgcctgagcagcagactgagagtgtccgccaccttctggcagaacccccggaaccacttcagatgccaggtgcagttctacggcctgagcgagaacgacgagtggacccaggacagagccaagcccgtgacccagatcgtgtctgccgaagcctggggcagagccgattgcggctttaccagcgagagctaccagcagggcgtgctgagcgccaccatcctgtacgagatcctgctgggcaaggccaccctgtacgccgtgctggtgtctgccctggtgctgatggctatggtcaagcggaaggacagccggggaagggccaagcgatctggatctggagcaacaaacttctcactactcaaacaagcaggtgacgtggaggagaatcccgggcctactagtgccaccatggactggatttggcgcatccttttccttgtcggcgctgctaccggcgcccattccttcgaacaagttcagcttcaacagcctggcgctgagctggtcaaacctggcgcttctgtgaagatgagctgcaaagccagcggctacgccttcagcagctactggatcaactggatgaagcagaaacccggccagggactcgaatggatcggccaaatctatcccggcgacggcgacaccaactacaacggcaagttcaagggcagagccacactgaccgccgatacctctagcagcacagcctacatgcagctgagcagcctgaccagcgaagatagcgccgtgtacttctgtgcccggtccatcacaacagtcgtgggctgcgctatggactattggggccagggaacaagcgtgaccgtgtctagtacgcgtatccagaaccctgatcctgccgtgtaccagctgcgggatagcaagagcagcgacaagagcgtgtgtctgttcaccgacttcgacagccagaccaacgtgtcccagagcaaggactccgacgtgtacatcaccgataagtgcgtgctggacatgcggagcatggacttcaagagcaactccgccgtggcctggtccaacaagtccgatttcgcctgcgccaacgccttcaacaacagcattatccccgaggacacattcttcccaagccccgagagcagctgcgacgtgaagctggtggaaaagagcttcgagacagacaccaacctgaacttccagaacctgagcgtgatcggcttcagaatcctgctgctgaaagtggccggctttaacctgctgatgaccctgcggctgtggtccagctaa

SEQ ID NO: 8057 - DNA, 1956 bp, synthetic construct
  source 1..1956: mol_type = other DNA
atggccttaccagtgaccgccttgctcctgccgctggccttgctgctccacgccgccaggccggcatgccgcagcgagaagcgctacggtaccggcggaggcggatctggcggcggaggtagcggtggcggaggatctgaattcgacatccagatgacacagagccctagcagcctgtctgccagcgtgggagacagagtgaccatcacatgcaaggccagcgaccacatcaacaactggctggcctggtatcagcagaagcctggacaggcccctaagctgctgatctacggcgctaccacactggaaacaggcgtgcccagcagattttctggcagcggctctggcaccgactacaccctgacaatatccagcctccagcctgaggacttcgccacctactactgtcagcagagctggaacaccccttggacattcggccagggcaccaagctggaaatcaagagactcgaggacctgaagaacgtgttcccacctgaggtggccgtgttcgagcctagcgaggccgagatcagccacacccagaaagccaccctcgtgtgcctggctaccggcttctaccccgaccatgtggaactgtcttggtgggtcaacggcaaagaggtgcacagcggcgtgtgtaccgacccccagccactgaaagaacagcccgccctgaacgacagccggtactgcctgagcagcagactgagagtgtccgccaccttctggcagaacccccggaaccacttcagatgccaggtgcagttctacggcctgagcgagaacgacgagtggacccaggacagagccaagcccgtgacccagatcgtgtctgccgaagcctggggcagagccgattgcggctttaccagcgagagctaccagcagggcgtgctgagcgccaccatcctgtacgagatcctgctgggcaaggccaccctgtacgccgtgctggtgtctgccctggtgctgatggctatggtcaagcggaaggacagccggggaagggccaagcgatctggatctggagcaacaaacttctcactactcaaacaagcaggtgacgtggaggagaatcccgggcctactagtgccaccatggactggatttggcgcatccttttccttgtcggcgctgctaccggcgcccattccttcgaacaagttcagcttcaacagcctggcgctgagctggtcaaacctggcgcttctgtgaagatgagctgcaaagccagcggctacgccttcagcagctactggatcaactggatgaagcagaaacccggccagggactcgaatggatcggccaaatctatcccggcgacggcgacaccaactacaacggcaagttcaagggcagagccacactgaccgccgatacctctagcagcacagcctacatgcagctgagcagcctgaccagcgaagatagcgccgtgtacttctgtgcccggtccatcacaacagtcgtgggctgcgctatggactattggggccagggaacaagcgtgaccgtgtctagtacgcgtatccagaaccctgatcctgccgtgtaccagctgcgggatagcaagagcagcgacaagagcgtgtgtctgttcaccgacttcgacagccagaccaacgtgtcccagagcaaggactccgacgtgtacatcaccgataagtgcgtgctggacatgcggagcatggacttcaagagcaactccgccgtggcctggtccaacaagtccgatttcgcctgcgccaacgccttcaacaacagcattatccccgaggacacattcttcccaagccccgagagcagctgcgacgtgaagctggtggaaaagagcttcgagacagacaccaacctgaacttccagaacctgagcgtgatcggcttcagaatcctgctgctgaaagtggccggctttaacctgctgatgaccctgcggctgtggtccagctaa

SEQ ID NO: 8058 - DNA, 1956 bp, synthetic construct
  source 1..1956: mol_type = other DNA
atggccttaccagtgaccgccttgctcctgccgctggccttgctgctccacgccgccaggccggcatgccgcagcgagctgcgctacggtaccggcggaggcggatctggcggcggaggtagcggtggcggaggatctgaattcgacatccagatgacacagagccctagcagcctgtctgccagcgtgggagacagagtgaccatcacatgcaaggccagcgaccacatcaacaactggctggcctggtatcagcagaagcctggacaggcccctaagctgctgatctacggcgctaccacactggaaacaggcgtgcccagcagattttctggcagcggctctggcaccgactacaccctgacaatatccagcctccagcctgaggacttcgccacctactactgtcagcagagctggaacaccccttggacattcggccagggcaccaagctggaaatcaagagactcgaggacctgaagaacgtgttcccacctgaggtggccgtgttcgagcctagcgaggccgagatcagccacacccagaaagccaccctcgtgtgcctggctaccggcttctaccccgaccatgtggaactgtcttggtgggtcaacggcaaagaggtgcacagcggcgtgtgtaccgacccccagccactgaaagaacagcccgccctgaacgacagccggtactgcctgagcagcagactgagagtgtccgccaccttctggcagaacccccggaaccacttcagatgccaggtgcagttctacggcctgagcgagaacgacgagtggacccaggacagagccaagcccgtgacccagatcgtgtctgccgaagcctggggcagagccgattgcggctttaccagcgagagctaccagcagggcgtgctgagcgccaccatcctgtacgagatcctgctgggcaaggccaccctgtacgccgtgctggtgtctgccctggtgctgatggctatggtcaagcggaaggacagccggggaagggccaagcgatctggatctggagcaacaaacttctcactactcaaacaagcaggtgacgtggaggagaatcccgggcctactagtgccaccatggactggatttggcgcatccttttccttgtcggcgctgctaccggcgcccattccttcgaacaagttcagcttcaacagcctggcgctgagctggtcaaacctggcgcttctgtgaagatgagctgcaaagccagcggctacgccttcagcagctactggatcaactggatgaagcagaaacccggccagggactcgaatggatcggccaaatctatcccggcgacggcgacaccaactacaacggcaagttcaagggcagagccacactgaccgccgatacctctagcagcacagcctacatgcagctgagcagcctgaccagcgaagatagcgccgtgtacttctgtgcccggtccatcacaacagtcgtgggctgcgctatggactattggggccagggaacaagcgtgaccgtgtctagtacgcgtatccagaaccctgatcctgccgtgtaccagctgcgggatagcaagagcagcgacaagagcgtgtgtctgttcaccgacttcgacagccagaccaacgtgtcccagagcaaggactccgacgtgtacatcaccgataagtgcgtgctggacatgcggagcatggacttcaagagcaactccgccgtggcctggtccaacaagtccgatttcgcctgcgccaacgccttcaacaacagcattatccccgaggacacattcttcccaagccccgagagcagctgcgacgtgaagctggtggaaaagagcttcgagacagacaccaacctgaacttccagaacctgagcgtgatcggcttcagaatcctgctgctgaaagtggccggctttaacctgctgatgaccctgcggctgtggtccagctaa

SEQ ID NO: 8059 - DNA, 1956 bp, synthetic construct
  source 1..1956: mol_type = other DNA
atggccttaccagtgaccgccttgctcctgccgctggccttgctgctccacgccgccaggccggcatgccgcagcgagacccgctacggtaccggcggaggcggatctggcggcggaggtagcggtggcggaggatctgaattcgacatccagatgacacagagccctagcagcctgtctgccagcgtgggagacagagtgaccatcacatgcaaggccagcgaccacatcaacaactggctggcctggtatcagcagaagcctggacaggcccctaagctgctgatctacggcgctaccacactggaaacaggcgtgcccagcagattttctggcagcggctctggcaccgactacaccctgacaatatccagcctccagcctgaggacttcgccacctactactgtcagcagagctggaacaccccttggacattcggccagggcaccaagctggaaatcaagagactcgaggacctgaagaacgtgttcccacctgaggtggccgtgttcgagcctagcgaggccgagatcagccacacccagaaagccaccctcgtgtgcctggctaccggcttctaccccgaccatgtggaactgtcttggtgggtcaacggcaaagaggtgcacagcggcgtgtgtaccgacccccagccactgaaagaacagcccgccctgaacgacagccggtactgcctgagcagcagactgagagtgtccgccaccttctggcagaacccccggaaccacttcagatgccaggtgcagttctacggcctgagcgagaacgacgagtggacccaggacagagccaagcccgtgacccagatcgtgtctgccgaagcctggggcagagccgattgcggctttaccagcgagagctaccagcagggcgtgctgagcgccaccatcctgtacgagatcctgctgggcaaggccaccctgtacgccgtgctggtgtctgccctggtgctgatggctatggtcaagcggaaggacagccggggaagggccaagcgatctggatctggagcaacaaacttctcactactcaaacaagcaggtgacgtggaggagaatcccgggcctactagtgccaccatggactggatttggcgcatccttttccttgtcggcgctgctaccggcgcccattccttcgaacaagttcagcttcaacagcctggcgctgagctggtcaaacctggcgcttctgtgaagatgagctgcaaagccagcggctacgccttcagcagctactggatcaactggatgaagcagaaacccggccagggactcgaatggatcggccaaatctatcccggcgacggcgacaccaactacaacggcaagttcaagggcagagccacactgaccgccgatacctctagcagcacagcctacatgcagctgagcagcctgaccagcgaagatagcgccgtgtacttctgtgcccggtccatcacaacagtcgtgggctgcgctatggactattggggccagggaacaagcgtgaccgtgtctagtacgcgtatccagaaccctgatcctgccgtgtaccagctgcgggatagcaagagcagcgacaagagcgtgtgtctgttcaccgacttcgacagccagaccaacgtgtcccagagcaaggactccgacgtgtacatcaccgataagtgcgtgctggacatgcggagcatggacttcaagagcaactccgccgtggcctggtccaacaagtccgatttcgcctgcgccaacgccttcaacaacagcattatccccgaggacacattcttcccaagccccgagagcagctgcgacgtgaagctggtggaaaagagcttcgagacagacaccaacctgaacttccagaacctgagcgtgatcggcttcagaatcctgctgctgaaagtggccggctttaacctgctgatgaccctgcggctgtggtccagctaa

SEQ ID NO: 8060 - DNA, 1959 bp, synthetic construct
  source 1..1959: mol_type = other DNA
atggccttaccagtgaccgccttgctcctgccgctggccttgctgctccacgccgccaggccggcatgccgcagcgaggaccgctacaagggtaccggcggaggcggatctggcggcggaggtagcggtggcggaggatctgaattcgacatccagatgacacagagccctagcagcctgtctgccagcgtgggagacagagtgaccatcacatgcaaggccagcgaccacatcaacaactggctggcctggtatcagcagaagcctggacaggcccctaagctgctgatctacggcgctaccacactggaaacaggcgtgcccagcagattttctggcagcggctctggcaccgactacaccctgacaatatccagcctccagcctgaggacttcgccacctactactgtcagcagagctggaacaccccttggacattcggccagggcaccaagctggaaatcaagagactcgaggacctgaagaacgtgttcccacctgaggtggccgtgttcgagcctagcgaggccgagatcagccacacccagaaagccaccctcgtgtgcctggctaccggcttctaccccgaccatgtggaactgtcttggtgggtcaacggcaaagaggtgcacagcggcgtgtgtaccgacccccagccactgaaagaacagcccgccctgaacgacagccggtactgcctgagcagcagactgagagtgtccgccaccttctggcagaacccccggaaccacttcagatgccaggtgcagttctacggcctgagcgagaacgacgagtggacccaggacagagccaagcccgtgacccagatcgtgtctgccgaagcctggggcagagccgattgcggctttaccagcgagagctaccagcagggcgtgctgagcgccaccatcctgtacgagatcctgctgggcaaggccaccctgtacgccgtgctggtgtctgccctggtgctgatggctatggtcaagcggaaggacagccggggaagggccaagcgatctggatctggagcaacaaacttctcactactcaaacaagcaggtgacgtggaggagaatcccgggcctactagtgccaccatggactggatttggcgcatccttttccttgtcggcgctgctaccggcgcccattccttcgaacaagttcagcttcaacagcctggcgctgagctggtcaaacctggcgcttctgtgaagatgagctgcaaagccagcggctacgccttcagcagctactggatcaactggatgaagcagaaacccggccagggactcgaatggatcggccaaatctatcccggcgacggcgacaccaactacaacggcaagttcaagggcagagccacactgaccgccgatacctctagcagcacagcctacatgcagctgagcagcctgaccagcgaagatagcgccgtgtacttctgtgcccggtccatcacaacagtcgtgggctgcgctatggactattggggccagggaacaagcgtgaccgtgtctagtacgcgtatccagaaccctgatcctgccgtgtaccagctgcgggatagcaagagcagcgacaagagcgtgtgtctgttcaccgacttcgacagccagaccaacgtgtcccagagcaaggactccgacgtgtacatcaccgataagtgcgtgctggacatgcggagcatggacttcaagagcaactccgccgtggcctggtccaacaagtccgatttcgcctgcgccaacgccttcaacaacagcattatccccgaggacacattcttcccaagccccgagagcagctgcgacgtgaagctggtggaaaagagcttcgagacagacaccaacctgaacttccagaacctgagcgtgatcggcttcagaatcctgctgctgaaagtggccggctttaacctgctgatgaccctgcggctgtggtccagctaa

SEQ ID NO: 8061 - DNA, 1959 bp, synthetic construct
  source 1..1959: mol_type = other DNA
atggccttaccagtgaccgccttgctcctgccgctggccttgctgctccacgccgccaggccggcatgccgcagcgaggaccgctacagcggtaccggcggaggcggatctggcggcggaggtagcggtggcggaggatctgaattcgacatccagatgacacagagccctagcagcctgtctgccagcgtgggagacagagtgaccatcacatgcaaggccagcgaccacatcaacaactggctggcctggtatcagcagaagcctggacaggcccctaagctgctgatctacggcgctaccacactggaaacaggcgtgcccagcagattttctggcagcggctctggcaccgactacaccctgacaatatccagcctccagcctgaggacttcgccacctactactgtcagcagagctggaacaccccttggacattcggccagggcaccaagctggaaatcaagagactcgaggacctgaagaacgtgttcccacctgaggtggccgtgttcgagcctagcgaggccgagatcagccacacccagaaagccaccctcgtgtgcctggctaccggcttctaccccgaccatgtggaactgtcttggtgggtcaacggcaaagaggtgcacagcggcgtgtgtaccgacccccagccactgaaagaacagcccgccctgaacgacagccggtactgcctgagcagcagactgagagtgtccgccaccttctggcagaacccccggaaccacttcagatgccaggtgcagttctacggcctgagcgagaacgacgagtggacccaggacagagccaagcccgtgacccagatcgtgtctgccgaagcctggggcagagccgattgcggctttaccagcgagagctaccagcagggcgtgctgagcgccaccatcctgtacgagatcctgctgggcaaggccaccctgtacgccgtgctggtgtctgccctggtgctgatggctatggtcaagcggaaggacagccggggaagggccaagcgatctggatctggagcaacaaacttctcactactcaaacaagcaggtgacgtggaggagaatcccgggcctactagtgccaccatggactggatttggcgcatccttttccttgtcggcgctgctaccggcgcccattccttcgaacaagttcagcttcaacagcctggcgctgagctggtcaaacctggcgcttctgtgaagatgagctgcaaagccagcggctacgccttcagcagctactggatcaactggatgaagcagaaacccggccagggactcgaatggatcggccaaatctatcccggcgacggcgacaccaactacaacggcaagttcaagggcagagccacactgaccgccgatacctctagcagcacagcctacatgcagctgagcagcctgaccagcgaagatagcgccgtgtacttctgtgcccggtccatcacaacagtcgtgggctgcgctatggactattggggccagggaacaagcgtgaccgtgtctagtacgcgtatccagaaccctgatcctgccgtgtaccagctgcgggatagcaagagcagcgacaagagcgtgtgtctgttcaccgacttcgacagccagaccaacgtgtcccagagcaaggactccgacgtgtacatcaccgataagtgcgtgctggacatgcggagcatggacttcaagagcaactccgccgtggcctggtccaacaagtccgatttcgcctgcgccaacgccttcaacaacagcattatccccgaggacacattcttcccaagccccgagagcagctgcgacgtgaagctggtggaaaagagcttcgagacagacaccaacctgaacttccagaacctgagcgtgatcggcttcagaatcctgctgctgaaagtggccggctttaacctgctgatgaccctgcggctgtggtccagctaa

SEQ ID NO: 8062 - DNA, 1959 bp, synthetic construct
  source 1..1959: mol_type = other DNA
atggccttaccagtgaccgccttgctcctgccgctggccttgctgctccacgccgccaggccggcatgccgcagcgaggaccgctacttcggtaccggcggaggcggatctggcggcggaggtagcggtggcggaggatctgaattcgacatccagatgacacagagccctagcagcctgtctgccagcgtgggagacagagtgaccatcacatgcaaggccagcgaccacatcaacaactggctggcctggtatcagcagaagcctggacaggcccctaagctgctgatctacggcgctaccacactggaaacaggcgtgcccagcagattttctggcagcggctctggcaccgactacaccctgacaatatccagcctccagcctgaggacttcgccacctactactgtcagcagagctggaacaccccttggacattcggccagggcaccaagctggaaatcaagagactcgaggacctgaagaacgtgttcccacctgaggtggccgtgttcgagcctagcgaggccgagatcagccacacccagaaagccaccctcgtgtgcctggctaccggcttctaccccgaccatgtggaactgtcttggtgggtcaacggcaaagaggtgcacagcggcgtgtgtaccgacccccagccactgaaagaacagcccgccctgaacgacagccggtactgcctgagcagcagactgagagtgtccgccaccttctggcagaacccccggaaccacttcagatgccaggtgcagttctacggcctgagcgagaacgacgagtggacccaggacagagccaagcccgtgacccagatcgtgtctgccgaagcctggggcagagccgattgcggctttaccagcgagagctaccagcagggcgtgctgagcgccaccatcctgtacgagatcctgctgggcaaggccaccctgtacgccgtgctggtgtctgccctggtgctgatggctatggtcaagcggaaggacagccggggaagggccaagcgatctggatctggagcaacaaacttctcactactcaaacaagcaggtgacgtggaggagaatcccgggcctactagtgccaccatggactggatttggcgcatccttttccttgtcggcgctgctaccggcgcccattccttcgaacaagttcagcttcaacagcctggcgctgagctggtcaaacctggcgcttctgtgaagatgagctgcaaagccagcggctacgccttcagcagctactggatcaactggatgaagcagaaacccggccagggactcgaatggatcggccaaatctatcccggcgacggcgacaccaactacaacggcaagttcaagggcagagccacactgaccgccgatacctctagcagcacagcctacatgcagctgagcagcctgaccagcgaagatagcgccgtgtacttctgtgcccggtccatcacaacagtcgtgggctgcgctatggactattggggccagggaacaagcgtgaccgtgtctagtacgcgtatccagaaccctgatcctgccgtgtaccagctgcgggatagcaagagcagcgacaagagcgtgtgtctgttcaccgacttcgacagccagaccaacgtgtcccagagcaaggactccgacgtgtacatcaccgataagtgcgtgctggacatgcggagcatggacttcaagagcaactccgccgtggcctggtccaacaagtccgatttcgcctgcgccaacgccttcaacaacagcattatccccgaggacacattcttcccaagccccgagagcagctgcgacgtgaagctggtggaaaagagcttcgagacagacaccaacctgaacttccagaacctgagcgtgatcggcttcagaatcctgctgctgaaagtggccggctttaacctgctgatgaccctgcggctgtggtccagctaa

SEQ ID NO: 8063 - DNA, 1959 bp, synthetic construct
  source 1..1959: mol_type = other DNA
atggccttaccagtgaccgccttgctcctgccgctggccttgctgctccacgccgccaggccggcatgccgcagcgaggaccgctacatcggtaccggcggaggcggatctggcggcggaggtagcggtggcggaggatctgaattcgacatccagatgacacagagccctagcagcctgtctgccagcgtgggagacagagtgaccatcacatgcaaggccagcgaccacatcaacaactggctggcctggtatcagcagaagcctggacaggcccctaagctgctgatctacggcgctaccacactggaaacaggcgtgcccagcagattttctggcagcggctctggcaccgactacaccctgacaatatccagcctccagcctgaggacttcgccacctactactgtcagcagagctggaacaccccttggacattcggccagggcaccaagctggaaatcaagagactcgaggacctgaagaacgtgttcccacctgaggtggccgtgttcgagcctagcgaggccgagatcagccacacccagaaagccaccctcgtgtgcctggctaccggcttctaccccgaccatgtggaactgtcttggtgggtcaacggcaaagaggtgcacagcggcgtgtgtaccgacccccagccactgaaagaacagcccgccctgaacgacagccggtactgcctgagcagcagactgagagtgtccgccaccttctggcagaacccccggaaccacttcagatgccaggtgcagttctacggcctgagcgagaacgacgagtggacccaggacagagccaagcccgtgacccagatcgtgtctgccgaagcctggggcagagccgattgcggctttaccagcgagagctaccagcagggcgtgctgagcgccaccatcctgtacgagatcctgctgggcaaggccaccctgtacgccgtgctggtgtctgccctggtgctgatggctatggtcaagcggaaggacagccggggaagggccaagcgatctggatctggagcaacaaacttctcactactcaaacaagcaggtgacgtggaggagaatcccgggcctactagtgccaccatggactggatttggcgcatccttttccttgtcggcgctgctaccggcgcccattccttcgaacaagttcagcttcaacagcctggcgctgagctggtcaaacctggcgcttctgtgaagatgagctgcaaagccagcggctacgccttcagcagctactggatcaactggatgaagcagaaacccggccagggactcgaatggatcggccaaatctatcccggcgacggcgacaccaactacaacggcaagttcaagggcagagccacactgaccgccgatacctctagcagcacagcctacatgcagctgagcagcctgaccagcgaagatagcgccgtgtacttctgtgcccggtccatcacaacagtcgtgggctgcgctatggactattggggccagggaacaagcgtgaccgtgtctagtacgcgtatccagaaccctgatcctgccgtgtaccagctgcgggatagcaagagcagcgacaagagcgtgtgtctgttcaccgacttcgacagccagaccaacgtgtcccagagcaaggactccgacgtgtacatcaccgataagtgcgtgctggacatgcggagcatggacttcaagagcaactccgccgtggcctggtccaacaagtccgatttcgcctgcgccaacgccttcaacaacagcattatccccgaggacacattcttcccaagccccgagagcagctgcgacgtgaagctggtggaaaagagcttcgagacagacaccaacctgaacttccagaacctgagcgtgatcggcttcagaatcctgctgctgaaagtggccggctttaacctgctgatgaccctgcggctgtggtccagctaa

SEQ ID NO: 8064 - DNA, 1959 bp, synthetic construct
  source 1..1959: mol_type = other DNA
atggccttaccagtgaccgccttgctcctgccgctggccttgctgctccacgccgccaggccggcatgccgcagcgaggaccgctacaacggtaccggcggaggcggatctggcggcggaggtagcggtggcggaggatctgaattcgacatccagatgacacagagccctagcagcctgtctgccagcgtgggagacagagtgaccatcacatgcaaggccagcgaccacatcaacaactggctggcctggtatcagcagaagcctggacaggcccctaagctgctgatctacggcgctaccacactggaaacaggcgtgcccagcagattttctggcagcggctctggcaccgactacaccctgacaatatccagcctccagcctgaggacttcgccacctactactgtcagcagagctggaacaccccttggacattcggccagggcaccaagctggaaatcaagagactcgaggacctgaagaacgtgttcccacctgaggtggccgtgttcgagcctagcgaggccgagatcagccacacccagaaagccaccctcgtgtgcctggctaccggcttctaccccgaccatgtggaactgtcttggtgggtcaacggcaaagaggtgcacagcggcgtgtgtaccgacccccagccactgaaagaacagcccgccctgaacgacagccggtactgcctgagcagcagactgagagtgtccgccaccttctggcagaacccccggaaccacttcagatgccaggtgcagttctacggcctgagcgagaacgacgagtggacccaggacagagccaagcccgtgacccagatcgtgtctgccgaagcctggggcagagccgattgcggctttaccagcgagagctaccagcagggcgtgctgagcgccaccatcctgtacgagatcctgctgggcaaggccaccctgtacgccgtgctggtgtctgccctggtgctgatggctatggtcaagcggaaggacagccggggaagggccaagcgatctggatctggagcaacaaacttctcactactcaaacaagcaggtgacgtggaggagaatcccgggcctactagtgccaccatggactggatttggcgcatccttttccttgtcggcgctgctaccggcgcccattccttcgaacaagttcagcttcaacagcctggcgctgagctggtcaaacctggcgcttctgtgaagatgagctgcaaagccagcggctacgccttcagcagctactggatcaactggatgaagcagaaacccggccagggactcgaatggatcggccaaatctatcccggcgacggcgacaccaactacaacggcaagttcaagggcagagccacactgaccgccgatacctctagcagcacagcctacatgcagctgagcagcctgaccagcgaagatagcgccgtgtacttctgtgcccggtccatcacaacagtcgtgggctgcgctatggactattggggccagggaacaagcgtgaccgtgtctagtacgcgtatccagaaccctgatcctgccgtgtaccagctgcgggatagcaagagcagcgacaagagcgtgtgtctgttcaccgacttcgacagccagaccaacgtgtcccagagcaaggactccgacgtgtacatcaccgataagtgcgtgctggacatgcggagcatggacttcaagagcaactccgccgtggcctggtccaacaagtccgatttcgcctgcgccaacgccttcaacaacagcattatccccgaggacacattcttcccaagccccgagagcagctgcgacgtgaagctggtggaaaagagcttcgagacagacaccaacctgaacttccagaacctgagcgtgatcggcttcagaatcctgctgctgaaagtggccggctttaacctgctgatgaccctgcggctgtggtccagctaa

SEQ ID NO: 8065 - DNA, 1959 bp, synthetic construct
  source 1..1959: mol_type = other DNA
atggccttaccagtgaccgccttgctcctgccgctggccttgctgctccacgccgccaggccggcatgccgcagcgaggaccgctacaccggtaccggcggaggcggatctggcggcggaggtagcggtggcggaggatctgaattcgacatccagatgacacagagccctagcagcctgtctgccagcgtgggagacagagtgaccatcacatgcaaggccagcgaccacatcaacaactggctggcctggtatcagcagaagcctggacaggcccctaagctgctgatctacggcgctaccacactggaaacaggcgtgcccagcagattttctggcagcggctctggcaccgactacaccctgacaatatccagcctccagcctgaggacttcgccacctactactgtcagcagagctggaacaccccttggacattcggccagggcaccaagctggaaatcaagagactcgaggacctgaagaacgtgttcccacctgaggtggccgtgttcgagcctagcgaggccgagatcagccacacccagaaagccaccctcgtgtgcctggctaccggcttctaccccgaccatgtggaactgtcttggtgggtcaacggcaaagaggtgcacagcggcgtgtgtaccgacccccagccactgaaagaacagcccgccctgaacgacagccggtactgcctgagcagcagactgagagtgtccgccaccttctggcagaacccccggaaccacttcagatgccaggtgcagttctacggcctgagcgagaacgacgagtggacccaggacagagccaagcccgtgacccagatcgtgtctgccgaagcctggggcagagccgattgcggctttaccagcgagagctaccagcagggcgtgctgagcgccaccatcctgtacgagatcctgctgggcaaggccaccctgtacgccgtgctggtgtctgccctggtgctgatggctatggtcaagcggaaggacagccggggaagggccaagcgatctggatctggagcaacaaacttctcactactcaaacaagcaggtgacgtggaggagaatcccgggcctactagtgccaccatggactggatttggcgcatccttttccttgtcggcgctgctaccggcgcccattccttcgaacaagttcagcttcaacagcctggcgctgagctggtcaaacctggcgcttctgtgaagatgagctgcaaagccagcggctacgccttcagcagctactggatcaactggatgaagcagaaacccggccagggactcgaatggatcggccaaatctatcccggcgacggcgacaccaactacaacggcaagttcaagggcagagccacactgaccgccgatacctctagcagcacagcctacatgcagctgagcagcctgaccagcgaagatagcgccgtgtacttctgtgcccggtccatcacaacagtcgtgggctgcgctatggactattggggccagggaacaagcgtgaccgtgtctagtacgcgtatccagaaccctgatcctgccgtgtaccagctgcgggatagcaagagcagcgacaagagcgtgtgtctgttcaccgacttcgacagccagaccaacgtgtcccagagcaaggactccgacgtgtacatcaccgataagtgcgtgctggacatgcggagcatggacttcaagagcaactccgccgtggcctggtccaacaagtccgatttcgcctgcgccaacgccttcaacaacagcattatccccgaggacacattcttcccaagccccgagagcagctgcgacgtgaagctggtggaaaagagcttcgagacagacaccaacctgaacttccagaacctgagcgtgatcggcttcagaatcctgctgctgaaagtggccggctttaacctgctgatgaccctgcggctgtggtccagctaa

SEQ ID NO: 8066 - DNA, 1959 bp, synthetic construct
  source 1..1959: mol_type = other DNA
atggccttaccagtgaccgccttgctcctgccgctggccttgctgctccacgccgccaggccggcatgccgcagcgaggaccgctacgccggtaccggcggaggcggatctggcggcggaggtagcggtggcggaggatctgaattcgacatccagatgacacagagccctagcagcctgtctgccagcgtgggagacagagtgaccatcacatgcaaggccagcgaccacatcaacaactggctggcctggtatcagcagaagcctggacaggcccctaagctgctgatctacggcgctaccacactggaaacaggcgtgcccagcagattttctggcagcggctctggcaccgactacaccctgacaatatccagcctccagcctgaggacttcgccacctactactgtcagcagagctggaacaccccttggacattcggccagggcaccaagctggaaatcaagagactcgaggacctgaagaacgtgttcccacctgaggtggccgtgttcgagcctagcgaggccgagatcagccacacccagaaagccaccctcgtgtgcctggctaccggcttctaccccgaccatgtggaactgtcttggtgggtcaacggcaaagaggtgcacagcggcgtgtgtaccgacccccagccactgaaagaacagcccgccctgaacgacagccggtactgcctgagcagcagactgagagtgtccgccaccttctggcagaacccccggaaccacttcagatgccaggtgcagttctacggcctgagcgagaacgacgagtggacccaggacagagccaagcccgtgacccagatcgtgtctgccgaagcctggggcagagccgattgcggctttaccagcgagagctaccagcagggcgtgctgagcgccaccatcctgtacgagatcctgctgggcaaggccaccctgtacgccgtgctggtgtctgccctggtgctgatggctatggtcaagcggaaggacagccggggaagggccaagcgatctggatctggagcaacaaacttctcactactcaaacaagcaggtgacgtggaggagaatcccgggcctactagtgccaccatggactggatttggcgcatccttttccttgtcggcgctgctaccggcgcccattccttcgaacaagttcagcttcaacagcctggcgctgagctggtcaaacctggcgcttctgtgaagatgagctgcaaagccagcggctacgccttcagcagctactggatcaactggatgaagcagaaacccggccagggactcgaatggatcggccaaatctatcccggcgacggcgacaccaactacaacggcaagttcaagggcagagccacactgaccgccgatacctctagcagcacagcctacatgcagctgagcagcctgaccagcgaagatagcgccgtgtacttctgtgcccggtccatcacaacagtcgtgggctgcgctatggactattggggccagggaacaagcgtgaccgtgtctagtacgcgtatccagaaccctgatcctgccgtgtaccagctgcgggatagcaagagcagcgacaagagcgtgtgtctgttcaccgacttcgacagccagaccaacgtgtcccagagcaaggactccgacgtgtacatcaccgataagtgcgtgctggacatgcggagcatggacttcaagagcaactccgccgtggcctggtccaacaagtccgatttcgcctgcgccaacgccttcaacaacagcattatccccgaggacacattcttcccaagccccgagagcagctgcgacgtgaagctggtggaaaagagcttcgagacagacaccaacctgaacttccagaacctgagcgtgatcggcttcagaatcctgctgctgaaagtggccggctttaacctgctgatgaccctgcggctgtggtccagctaa

SEQ ID NO: 8067 - DNA, 1959 bp, synthetic construct
  source 1..1959: mol_type = other DNA
atggccttaccagtgaccgccttgctcctgccgctggccttgctgctccacgccgccaggccggcatgccgcagcgaggaccactaccgcggtaccggcggaggcggatctggcggcggaggtagcggtggcggaggatctgaattcgacatccagatgacacagagccctagcagcctgtctgccagcgtgggagacagagtgaccatcacatgcaaggccagcgaccacatcaacaactggctggcctggtatcagcagaagcctggacaggcccctaagctgctgatctacggcgctaccacactggaaacaggcgtgcccagcagattttctggcagcggctctggcaccgactacaccctgacaatatccagcctccagcctgaggacttcgccacctactactgtcagcagagctggaacaccccttggacattcggccagggcaccaagctggaaatcaagagactcgaggacctgaagaacgtgttcccacctgaggtggccgtgttcgagcctagcgaggccgagatcagccacacccagaaagccaccctcgtgtgcctggctaccggcttctaccccgaccatgtggaactgtcttggtgggtcaacggcaaagaggtgcacagcggcgtgtgtaccgacccccagccactgaaagaacagcccgccctgaacgacagccggtactgcctgagcagcagactgagagtgtccgccaccttctggcagaacccccggaaccacttcagatgccaggtgcagttctacggcctgagcgagaacgacgagtggacccaggacagagccaagcccgtgacccagatcgtgtctgccgaagcctggggcagagccgattgcggctttaccagcgagagctaccagcagggcgtgctgagcgccaccatcctgtacgagatcctgctgggcaaggccaccctgtacgccgtgctggtgtctgccctggtgctgatggctatggtcaagcggaaggacagccggggaagggccaagcgatctggatctggagcaacaaacttctcactactcaaacaagcaggtgacgtggaggagaatcccgggcctactagtgccaccatggactggatttggcgcatccttttccttgtcggcgctgctaccggcgcccattccttcgaacaagttcagcttcaacagcctggcgctgagctggtcaaacctggcgcttctgtgaagatgagctgcaaagccagcggctacgccttcagcagctactggatcaactggatgaagcagaaacccggccagggactcgaatggatcggccaaatctatcccggcgacggcgacaccaactacaacggcaagttcaagggcagagccacactgaccgccgatacctctagcagcacagcctacatgcagctgagcagcctgaccagcgaagatagcgccgtgtacttctgtgcccggtccatcacaacagtcgtgggctgcgctatggactattggggccagggaacaagcgtgaccgtgtctagtacgcgtatccagaaccctgatcctgccgtgtaccagctgcgggatagcaagagcagcgacaagagcgtgtgtctgttcaccgacttcgacagccagaccaacgtgtcccagagcaaggactccgacgtgtacatcaccgataagtgcgtgctggacatgcggagcatggacttcaagagcaactccgccgtggcctggtccaacaagtccgatttcgcctgcgccaacgccttcaacaacagcattatccccgaggacacattcttcccaagccccgagagcagctgcgacgtgaagctggtggaaaagagcttcgagacagacaccaacctgaacttccagaacctgagcgtgatcggcttcagaatcctgctgctgaaagtggccggctttaacctgctgatgaccctgcggctgtggtccagctaa

SEQ ID NO: 8068 - DNA, 1959 bp, synthetic construct
  source 1..1959: mol_type = other DNA
atggccttaccagtgaccgccttgctcctgccgctggccttgctgctccacgccgccaggccggcatgccgcagcgagagccgctaccgcggtaccggcggaggcggatctggcggcggaggtagcggtggcggaggatctgaattcgacatccagatgacacagagccctagcagcctgtctgccagcgtgggagacagagtgaccatcacatgcaaggccagcgaccacatcaacaactggctggcctggtatcagcagaagcctggacaggcccctaagctgctgatctacggcgctaccacactggaaacaggcgtgcccagcagattttctggcagcggctctggcaccgactacaccctgacaatatccagcctccagcctgaggacttcgccacctactactgtcagcagagctggaacaccccttggacattcggccagggcaccaagctggaaatcaagagactcgaggacctgaagaacgtgttcccacctgaggtggccgtgttcgagcctagcgaggccgagatcagccacacccagaaagccaccctcgtgtgcctggctaccggcttctaccccgaccatgtggaactgtcttggtgggtcaacggcaaagaggtgcacagcggcgtgtgtaccgacccccagccactgaaagaacagcccgccctgaacgacagccggtactgcctgagcagcagactgagagtgtccgccaccttctggcagaacccccggaaccacttcagatgccaggtgcagttctacggcctgagcgagaacgacgagtggacccaggacagagccaagcccgtgacccagatcgtgtctgccgaagcctggggcagagccgattgcggctttaccagcgagagctaccagcagggcgtgctgagcgccaccatcctgtacgagatcctgctgggcaaggccaccctgtacgccgtgctggtgtctgccctggtgctgatggctatggtcaagcggaaggacagccggggaagggccaagcgatctggatctggagcaacaaacttctcactactcaaacaagcaggtgacgtggaggagaatcccgggcctactagtgccaccatggactggatttggcgcatccttttccttgtcggcgctgctaccggcgcccattccttcgaacaagttcagcttcaacagcctggcgctgagctggtcaaacctggcgcttctgtgaagatgagctgcaaagccagcggctacgccttcagcagctactggatcaactggatgaagcagaaacccggccagggactcgaatggatcggccaaatctatcccggcgacggcgacaccaactacaacggcaagttcaagggcagagccacactgaccgccgatacctctagcagcacagcctacatgcagctgagcagcctgaccagcgaagatagcgccgtgtacttctgtgcccggtccatcacaacagtcgtgggctgcgctatggactattggggccagggaacaagcgtgaccgtgtctagtacgcgtatccagaaccctgatcctgccgtgtaccagctgcgggatagcaagagcagcgacaagagcgtgtgtctgttcaccgacttcgacagccagaccaacgtgtcccagagcaaggactccgacgtgtacatcaccgataagtgcgtgctggacatgcggagcatggacttcaagagcaactccgccgtggcctggtccaacaagtccgatttcgcctgcgccaacgccttcaacaacagcattatccccgaggacacattcttcccaagccccgagagcagctgcgacgtgaagctggtggaaaagagcttcgagacagacaccaacctgaacttccagaacctgagcgtgatcggcttcagaatcctgctgctgaaagtggccggctttaacctgctgatgaccctgcggctgtggtccagctaa

SEQ ID NO: 8069 - DNA, 1959 bp, synthetic construct
  source 1..1959: mol_type = other DNA
atggccttaccagtgaccgccttgctcctgccgctggccttgctgctccacgccgccaggccggcatgccgcagcgagaaccgctaccgcggtaccggcggaggcggatctggcggcggaggtagcggtggcggaggatctgaattcgacatccagatgacacagagccctagcagcctgtctgccagcgtgggagacagagtgaccatcacatgcaaggccagcgaccacatcaacaactggctggcctggtatcagcagaagcctggacaggcccctaagctgctgatctacggcgctaccacactggaaacaggcgtgcccagcagattttctggcagcggctctggcaccgactacaccctgacaatatccagcctccagcctgaggacttcgccacctactactgtcagcagagctggaacaccccttggacattcggccagggcaccaagctggaaatcaagagactcgaggacctgaagaacgtgttcccacctgaggtggccgtgttcgagcctagcgaggccgagatcagccacacccagaaagccaccctcgtgtgcctggctaccggcttctaccccgaccatgtggaactgtcttggtgggtcaacggcaaagaggtgcacagcggcgtgtgtaccgacccccagccactgaaagaacagcccgccctgaacgacagccggtactgcctgagcagcagactgagagtgtccgccaccttctggcagaacccccggaaccacttcagatgccaggtgcagttctacggcctgagcgagaacgacgagtggacccaggacagagccaagcccgtgacccagatcgtgtctgccgaagcctggggcagagccgattgcggctttaccagcgagagctaccagcagggcgtgctgagcgccaccatcctgtacgagatcctgctgggcaaggccaccctgtacgccgtgctggtgtctgccctggtgctgatggctatggtcaagcggaaggacagccggggaagggccaagcgatctggatctggagcaacaaacttctcactactcaaacaagcaggtgacgtggaggagaatcccgggcctactagtgccaccatggactggatttggcgcatccttttccttgtcggcgctgctaccggcgcccattccttcgaacaagttcagcttcaacagcctggcgctgagctggtcaaacctggcgcttctgtgaagatgagctgcaaagccagcggctacgccttcagcagctactggatcaactggatgaagcagaaacccggccagggactcgaatggatcggccaaatctatcccggcgacggcgacaccaactacaacggcaagttcaagggcagagccacactgaccgccgatacctctagcagcacagcctacatgcagctgagcagcctgaccagcgaagatagcgccgtgtacttctgtgcccggtccatcacaacagtcgtgggctgcgctatggactattggggccagggaacaagcgtgaccgtgtctagtacgcgtatccagaaccctgatcctgccgtgtaccagctgcgggatagcaagagcagcgacaagagcgtgtgtctgttcaccgacttcgacagccagaccaacgtgtcccagagcaaggactccgacgtgtacatcaccgataagtgcgtgctggacatgcggagcatggacttcaagagcaactccgccgtggcctggtccaacaagtccgatttcgcctgcgccaacgccttcaacaacagcattatccccgaggacacattcttcccaagccccgagagcagctgcgacgtgaagctggtggaaaagagcttcgagacagacaccaacctgaacttccagaacctgagcgtgatcggcttcagaatcctgctgctgaaagtggccggctttaacctgctgatgaccctgcggctgtggtccagctaa

SEQ ID NO: 8070 - DNA, 1959 bp, synthetic construct
  source 1..1959: mol_type = other DNA
atggccttaccagtgaccgccttgctcctgccgctggccttgctgctccacgccgccaggccggcatgccgcagcgagggccgctaccgcggtaccggcggaggcggatctggcggcggaggtagcggtggcggaggatctgaattcgacatccagatgacacagagccctagcagcctgtctgccagcgtgggagacagagtgaccatcacatgcaaggccagcgaccacatcaacaactggctggcctggtatcagcagaagcctggacaggcccctaagctgctgatctacggcgctaccacactggaaacaggcgtgcccagcagattttctggcagcggctctggcaccgactacaccctgacaatatccagcctccagcctgaggacttcgccacctactactgtcagcagagctggaacaccccttggacattcggccagggcaccaagctggaaatcaagagactcgaggacctgaagaacgtgttcccacctgaggtggccgtgttcgagcctagcgaggccgagatcagccacacccagaaagccaccctcgtgtgcctggctaccggcttctaccccgaccatgtggaactgtcttggtgggtcaacggcaaagaggtgcacagcggcgtgtgtaccgacccccagccactgaaagaacagcccgccctgaacgacagccggtactgcctgagcagcagactgagagtgtccgccaccttctggcagaacccccggaaccacttcagatgccaggtgcagttctacggcctgagcgagaacgacgagtggacccaggacagagccaagcccgtgacccagatcgtgtctgccgaagcctggggcagagccgattgcggctttaccagcgagagctaccagcagggcgtgctgagcgccaccatcctgtacgagatcctgctgggcaaggccaccctgtacgccgtgctggtgtctgccctggtgctgatggctatggtcaagcggaaggacagccggggaagggccaagcgatctggatctggagcaacaaacttctcactactcaaacaagcaggtgacgtggaggagaatcccgggcctactagtgccaccatggactggatttggcgcatccttttccttgtcggcgctgctaccggcgcccattccttcgaacaagttcagcttcaacagcctggcgctgagctggtcaaacctggcgcttctgtgaagatgagctgcaaagccagcggctacgccttcagcagctactggatcaactggatgaagcagaaacccggccagggactcgaatggatcggccaaatctatcccggcgacggcgacaccaactacaacggcaagttcaagggcagagccacactgaccgccgatacctctagcagcacagcctacatgcagctgagcagcctgaccagcgaagatagcgccgtgtacttctgtgcccggtccatcacaacagtcgtgggctgcgctatggactattggggccagggaacaagcgtgaccgtgtctagtacgcgtatccagaaccctgatcctgccgtgtaccagctgcgggatagcaagagcagcgacaagagcgtgtgtctgttcaccgacttcgacagccagaccaacgtgtcccagagcaaggactccgacgtgtacatcaccgataagtgcgtgctggacatgcggagcatggacttcaagagcaactccgccgtggcctggtccaacaagtccgatttcgcctgcgccaacgccttcaacaacagcattatccccgaggacacattcttcccaagccccgagagcagctgcgacgtgaagctggtggaaaagagcttcgagacagacaccaacctgaacttccagaacctgagcgtgatcggcttcagaatcctgctgctgaaagtggccggctttaacctgctgatgaccctgcggctgtggtccagctaa

SEQ ID NO: 8071 - DNA, 1959 bp, synthetic construct
  source 1..1959: mol_type = other DNA
atggccttaccagtgaccgccttgctcctgccgctggccttgctgctccacgccgccaggccggcatgccgcagcgaggcccgctaccgcggtaccggcggaggcggatctggcggcggaggtagcggtggcggaggatctgaattcgacatccagatgacacagagccctagcagcctgtctgccagcgtgggagacagagtgaccatcacatgcaaggccagcgaccacatcaacaactggctggcctggtatcagcagaagcctggacaggcccctaagctgctgatctacggcgctaccacactggaaacaggcgtgcccagcagattttctggcagcggctctggcaccgactacaccctgacaatatccagcctccagcctgaggacttcgccacctactactgtcagcagagctggaacaccccttggacattcggccagggcaccaagctggaaatcaagagactcgaggacctgaagaacgtgttcccacctgaggtggccgtgttcgagcctagcgaggccgagatcagccacacccagaaagccaccctcgtgtgcctggctaccggcttctaccccgaccatgtggaactgtcttggtgggtcaacggcaaagaggtgcacagcggcgtgtgtaccgacccccagccactgaaagaacagcccgccctgaacgacagccggtactgcctgagcagcagactgagagtgtccgccaccttctggcagaacccccggaaccacttcagatgccaggtgcagttctacggcctgagcgagaacgacgagtggacccaggacagagccaagcccgtgacccagatcgtgtctgccgaagcctggggcagagccgattgcggctttaccagcgagagctaccagcagggcgtgctgagcgccaccatcctgtacgagatcctgctgggcaaggccaccctgtacgccgtgctggtgtctgccctggtgctgatggctatggtcaagcggaaggacagccggggaagggccaagcgatctggatctggagcaacaaacttctcactactcaaacaagcaggtgacgtggaggagaatcccgggcctactagtgccaccatggactggatttggcgcatccttttccttgtcggcgctgctaccggcgcccattccttcgaacaagttcagcttcaacagcctggcgctgagctggtcaaacctggcgcttctgtgaagatgagctgcaaagccagcggctacgccttcagcagctactggatcaactggatgaagcagaaacccggccagggactcgaatggatcggccaaatctatcccggcgacggcgacaccaactacaacggcaagttcaagggcagagccacactgaccgccgatacctctagcagcacagcctacatgcagctgagcagcctgaccagcgaagatagcgccgtgtacttctgtgcccggtccatcacaacagtcgtgggctgcgctatggactattggggccagggaacaagcgtgaccgtgtctagtacgcgtatccagaaccctgatcctgccgtgtaccagctgcgggatagcaagagcagcgacaagagcgtgtgtctgttcaccgacttcgacagccagaccaacgtgtcccagagcaaggactccgacgtgtacatcaccgataagtgcgtgctggacatgcggagcatggacttcaagagcaactccgccgtggcctggtccaacaagtccgatttcgcctgcgccaacgccttcaacaacagcattatccccgaggacacattcttcccaagccccgagagcagctgcgacgtgaagctggtggaaaagagcttcgagacagacaccaacctgaacttccagaacctgagcgtgatcggcttcagaatcctgctgctgaaagtggccggctttaacctgctgatgaccctgcggctgtggtccagctaa

SEQ ID NO: 8072 - DNA, 1959 bp, synthetic construct
  source 1..1959: mol_type = other DNA
atggccttaccagtgaccgccttgctcctgccgctggccttgctgctccacgccgccaggccggcatgccgcagcgagcagcgctaccgcggtaccggcggaggcggatctggcggcggaggtagcggtggcggaggatctgaattcgacatccagatgacacagagccctagcagcctgtctgccagcgtgggagacagagtgaccatcacatgcaaggccagcgaccacatcaacaactggctggcctggtatcagcagaagcctggacaggcccctaagctgctgatctacggcgctaccacactggaaacaggcgtgcccagcagattttctggcagcggctctggcaccgactacaccctgacaatatccagcctccagcctgaggacttcgccacctactactgtcagcagagctggaacaccccttggacattcggccagggcaccaagctggaaatcaagagactcgaggacctgaagaacgtgttcccacctgaggtggccgtgttcgagcctagcgaggccgagatcagccacacccagaaagccaccctcgtgtgcctggctaccggcttctaccccgaccatgtggaactgtcttggtgggtcaacggcaaagaggtgcacagcggcgtgtgtaccgacccccagccactgaaagaacagcccgccctgaacgacagccggtactgcctgagcagcagactgagagtgtccgccaccttctggcagaacccccggaaccacttcagatgccaggtgcagttctacggcctgagcgagaacgacgagtggacccaggacagagccaagcccgtgacccagatcgtgtctgccgaagcctggggcagagccgattgcggctttaccagcgagagctaccagcagggcgtgctgagcgccaccatcctgtacgagatcctgctgggcaaggccaccctgtacgccgtgctggtgtctgccctggtgctgatggctatggtcaagcggaaggacagccggggaagggccaagcgatctggatctggagcaacaaacttctcactactcaaacaagcaggtgacgtggaggagaatcccgggcctactagtgccaccatggactggatttggcgcatccttttccttgtcggcgctgctaccggcgcccattccttcgaacaagttcagcttcaacagcctggcgctgagctggtcaaacctggcgcttctgtgaagatgagctgcaaagccagcggctacgccttcagcagctactggatcaactggatgaagcagaaacccggccagggactcgaatggatcggccaaatctatcccggcgacggcgacaccaactacaacggcaagttcaagggcagagccacactgaccgccgatacctctagcagcacagcctacatgcagctgagcagcctgaccagcgaagatagcgccgtgtacttctgtgcccggtccatcacaacagtcgtgggctgcgctatggactattggggccagggaacaagcgtgaccgtgtctagtacgcgtatccagaaccctgatcctgccgtgtaccagctgcgggatagcaagagcagcgacaagagcgtgtgtctgttcaccgacttcgacagccagaccaacgtgtcccagagcaaggactccgacgtgtacatcaccgataagtgcgtgctggacatgcggagcatggacttcaagagcaactccgccgtggcctggtccaacaagtccgatttcgcctgcgccaacgccttcaacaacagcattatccccgaggacacattcttcccaagccccgagagcagctgcgacgtgaagctggtggaaaagagcttcgagacagacaccaacctgaacttccagaacctgagcgtgatcggcttcagaatcctgctgctgaaagtggccggctttaacctgctgatgaccctgcggctgtggtccagctaa

SEQ ID NO: 8073 - DNA, 1959 bp, synthetic construct
  source 1..1959: mol_type = other DNA
atggccttaccagtgaccgccttgctcctgccgctggccttgctgctccacgccgccaggccggcatgccgcagcgagaagcgctaccgcggtaccggcggaggcggatctggcggcggaggtagcggtggcggaggatctgaattcgacatccagatgacacagagccctagcagcctgtctgccagcgtgggagacagagtgaccatcacatgcaaggccagcgaccacatcaacaactggctggcctggtatcagcagaagcctggacaggcccctaagctgctgatctacggcgctaccacactggaaacaggcgtgcccagcagattttctggcagcggctctggcaccgactacaccctgacaatatccagcctccagcctgaggacttcgccacctactactgtcagcagagctggaacaccccttggacattcggccagggcaccaagctggaaatcaagagactcgaggacctgaagaacgtgttcccacctgaggtggccgtgttcgagcctagcgaggccgagatcagccacacccagaaagccaccctcgtgtgcctggctaccggcttctaccccgaccatgtggaactgtcttggtgggtcaacggcaaagaggtgcacagcggcgtgtgtaccgacccccagccactgaaagaacagcccgccctgaacgacagccggtactgcctgagcagcagactgagagtgtccgccaccttctggcagaacccccggaaccacttcagatgccaggtgcagttctacggcctgagcgagaacgacgagtggacccaggacagagccaagcccgtgacccagatcgtgtctgccgaagcctggggcagagccgattgcggctttaccagcgagagctaccagcagggcgtgctgagcgccaccatcctgtacgagatcctgctgggcaaggccaccctgtacgccgtgctggtgtctgccctggtgctgatggctatggtcaagcggaaggacagccggggaagggccaagcgatctggatctggagcaacaaacttctcactactcaaacaagcaggtgacgtggaggagaatcccgggcctactagtgccaccatggactggatttggcgcatccttttccttgtcggcgctgctaccggcgcccattccttcgaacaagttcagcttcaacagcctggcgctgagctggtcaaacctggcgcttctgtgaagatgagctgcaaagccagcggctacgccttcagcagctactggatcaactggatgaagcagaaacccggccagggactcgaatggatcggccaaatctatcccggcgacggcgacaccaactacaacggcaagttcaagggcagagccacactgaccgccgatacctctagcagcacagcctacatgcagctgagcagcctgaccagcgaagatagcgccgtgtacttctgtgcccggtccatcacaacagtcgtgggctgcgctatggactattggggccagggaacaagcgtgaccgtgtctagtacgcgtatccagaaccctgatcctgccgtgtaccagctgcgggatagcaagagcagcgacaagagcgtgtgtctgttcaccgacttcgacagccagaccaacgtgtcccagagcaaggactccgacgtgtacatcaccgataagtgcgtgctggacatgcggagcatggacttcaagagcaactccgccgtggcctggtccaacaagtccgatttcgcctgcgccaacgccttcaacaacagcattatccccgaggacacattcttcccaagccccgagagcagctgcgacgtgaagctggtggaaaagagcttcgagacagacaccaacctgaacttccagaacctgagcgtgatcggcttcagaatcctgctgctgaaagtggccggctttaacctgctgatgaccctgcggctgtggtccagctaa

SEQ ID NO: 8074 - DNA, 1959 bp, synthetic construct
  source 1..1959: mol_type = other DNA
atggccttaccagtgaccgccttgctcctgccgctggccttgctgctccacgccgccaggccggcatgccgcagcgagctgcgctaccgcggtaccggcggaggcggatctggcggcggaggtagcggtggcggaggatctgaattcgacatccagatgacacagagccctagcagcctgtctgccagcgtgggagacagagtgaccatcacatgcaaggccagcgaccacatcaacaactggctggcctggtatcagcagaagcctggacaggcccctaagctgctgatctacggcgctaccacactggaaacaggcgtgcccagcagattttctggcagcggctctggcaccgactacaccctgacaatatccagcctccagcctgaggacttcgccacctactactgtcagcagagctggaacaccccttggacattcggccagggcaccaagctggaaatcaagagactcgaggacctgaagaacgtgttcccacctgaggtggccgtgttcgagcctagcgaggccgagatcagccacacccagaaagccaccctcgtgtgcctggctaccggcttctaccccgaccatgtggaactgtcttggtgggtcaacggcaaagaggtgcacagcggcgtgtgtaccgacccccagccactgaaagaacagcccgccctgaacgacagccggtactgcctgagcagcagactgagagtgtccgccaccttctggcagaacccccggaaccacttcagatgccaggtgcagttctacggcctgagcgagaacgacgagtggacccaggacagagccaagcccgtgacccagatcgtgtctgccgaagcctggggcagagccgattgcggctttaccagcgagagctaccagcagggcgtgctgagcgccaccatcctgtacgagatcctgctgggcaaggccaccctgtacgccgtgctggtgtctgccctggtgctgatggctatggtcaagcggaaggacagccggggaagggccaagcgatctggatctggagcaacaaacttctcactactcaaacaagcaggtgacgtggaggagaatcccgggcctactagtgccaccatggactggatttggcgcatccttttccttgtcggcgctgctaccggcgcccattccttcgaacaagttcagcttcaacagcctggcgctgagctggtcaaacctggcgcttctgtgaagatgagctgcaaagccagcggctacgccttcagcagctactggatcaactggatgaagcagaaacccggccagggactcgaatggatcggccaaatctatcccggcgacggcgacaccaactacaacggcaagttcaagggcagagccacactgaccgccgatacctctagcagcacagcctacatgcagctgagcagcctgaccagcgaagatagcgccgtgtacttctgtgcccggtccatcacaacagtcgtgggctgcgctatggactattggggccagggaacaagcgtgaccgtgtctagtacgcgtatccagaaccctgatcctgccgtgtaccagctgcgggatagcaagagcagcgacaagagcgtgtgtctgttcaccgacttcgacagccagaccaacgtgtcccagagcaaggactccgacgtgtacatcaccgataagtgcgtgctggacatgcggagcatggacttcaagagcaactccgccgtggcctggtccaacaagtccgatttcgcctgcgccaacgccttcaacaacagcattatccccgaggacacattcttcccaagccccgagagcagctgcgacgtgaagctggtggaaaagagcttcgagacagacaccaacctgaacttccagaacctgagcgtgatcggcttcagaatcctgctgctgaaagtggccggctttaacctgctgatgaccctgcggctgtggtccagctaa

SEQ ID NO: 8075 - DNA, 1959 bp, synthetic construct
  source 1..1959: mol_type = other DNA
atggccttaccagtgaccgccttgctcctgccgctggccttgctgctccacgccgccaggccggcatgccgcagcgagacccgctaccgcggtaccggcggaggcggatctggcggcggaggtagcggtggcggaggatctgaattcgacatccagatgacacagagccctagcagcctgtctgccagcgtgggagacagagtgaccatcacatgcaaggccagcgaccacatcaacaactggctggcctggtatcagcagaagcctggacaggcccctaagctgctgatctacggcgctaccacactggaaacaggcgtgcccagcagattttctggcagcggctctggcaccgactacaccctgacaatatccagcctccagcctgaggacttcgccacctactactgtcagcagagctggaacaccccttggacattcggccagggcaccaagctggaaatcaagagactcgaggacctgaagaacgtgttcccacctgaggtggccgtgttcgagcctagcgaggccgagatcagccacacccagaaagccaccctcgtgtgcctggctaccggcttctaccccgaccatgtggaactgtcttggtgggtcaacggcaaagaggtgcacagcggcgtgtgtaccgacccccagccactgaaagaacagcccgccctgaacgacagccggtactgcctgagcagcagactgagagtgtccgccaccttctggcagaacccccggaaccacttcagatgccaggtgcagttctacggcctgagcgagaacgacgagtggacccaggacagagccaagcccgtgacccagatcgtgtctgccgaagcctggggcagagccgattgcggctttaccagcgagagctaccagcagggcgtgctgagcgccaccatcctgtacgagatcctgctgggcaaggccaccctgtacgccgtgctggtgtctgccctggtgctgatggctatggtcaagcggaaggacagccggggaagggccaagcgatctggatctggagcaacaaacttctcactactcaaacaagcaggtgacgtggaggagaatcccgggcctactagtgccaccatggactggatttggcgcatccttttccttgtcggcgctgctaccggcgcccattccttcgaacaagttcagcttcaacagcctggcgctgagctggtcaaacctggcgcttctgtgaagatgagctgcaaagccagcggctacgccttcagcagctactggatcaactggatgaagcagaaacccggccagggactcgaatggatcggccaaatctatcccggcgacggcgacaccaactacaacggcaagttcaagggcagagccacactgaccgccgatacctctagcagcacagcctacatgcagctgagcagcctgaccagcgaagatagcgccgtgtacttctgtgcccggtccatcacaacagtcgtgggctgcgctatggactattggggccagggaacaagcgtgaccgtgtctagtacgcgtatccagaaccctgatcctgccgtgtaccagctgcgggatagcaagagcagcgacaagagcgtgtgtctgttcaccgacttcgacagccagaccaacgtgtcccagagcaaggactccgacgtgtacatcaccgataagtgcgtgctggacatgcggagcatggacttcaagagcaactccgccgtggcctggtccaacaagtccgatttcgcctgcgccaacgccttcaacaacagcattatccccgaggacacattcttcccaagccccgagagcagctgcgacgtgaagctggtggaaaagagcttcgagacagacaccaacctgaacttccagaacctgagcgtgatcggcttcagaatcctgctgctgaaagtggccggctttaacctgctgatgaccctgcggctgtggtccagctaa

SEQ ID NO: 8076 - DNA, 1959 bp, synthetic construct
  source 1..1959: mol_type = other DNA
atggccttaccagtgaccgccttgctcctgccgctggccttgctgctccacgccgccaggccggcatgccgcagcgaggaccactacaagggtaccggcggaggcggatctggcggcggaggtagcggtggcggaggatctgaattcgacatccagatgacacagagccctagcagcctgtctgccagcgtgggagacagagtgaccatcacatgcaaggccagcgaccacatcaacaactggctggcctggtatcagcagaagcctggacaggcccctaagctgctgatctacggcgctaccacactggaaacaggcgtgcccagcagattttctggcagcggctctggcaccgactacaccctgacaatatccagcctccagcctgaggacttcgccacctactactgtcagcagagctggaacaccccttggacattcggccagggcaccaagctggaaatcaagagactcgaggacctgaagaacgtgttcccacctgaggtggccgtgttcgagcctagcgaggccgagatcagccacacccagaaagccaccctcgtgtgcctggctaccggcttctaccccgaccatgtggaactgtcttggtgggtcaacggcaaagaggtgcacagcggcgtgtgtaccgacccccagccactgaaagaacagcccgccctgaacgacagccggtactgcctgagcagcagactgagagtgtccgccaccttctggcagaacccccggaaccacttcagatgccaggtgcagttctacggcctgagcgagaacgacgagtggacccaggacagagccaagcccgtgacccagatcgtgtctgccgaagcctggggcagagccgattgcggctttaccagcgagagctaccagcagggcgtgctgagcgccaccatcctgtacgagatcctgctgggcaaggccaccctgtacgccgtgctggtgtctgccctggtgctgatggctatggtcaagcggaaggacagccggggaagggccaagcgatctggatctggagcaacaaacttctcactactcaaacaagcaggtgacgtggaggagaatcccgggcctactagtgccaccatggactggatttggcgcatccttttccttgtcggcgctgctaccggcgcccattccttcgaacaagttcagcttcaacagcctggcgctgagctggtcaaacctggcgcttctgtgaagatgagctgcaaagccagcggctacgccttcagcagctactggatcaactggatgaagcagaaacccggccagggactcgaatggatcggccaaatctatcccggcgacggcgacaccaactacaacggcaagttcaagggcagagccacactgaccgccgatacctctagcagcacagcctacatgcagctgagcagcctgaccagcgaagatagcgccgtgtacttctgtgcccggtccatcacaacagtcgtgggctgcgctatggactattggggccagggaacaagcgtgaccgtgtctagtacgcgtatccagaaccctgatcctgccgtgtaccagctgcgggatagcaagagcagcgacaagagcgtgtgtctgttcaccgacttcgacagccagaccaacgtgtcccagagcaaggactccgacgtgtacatcaccgataagtgcgtgctggacatgcggagcatggacttcaagagcaactccgccgtggcctggtccaacaagtccgatttcgcctgcgccaacgccttcaacaacagcattatccccgaggacacattcttcccaagccccgagagcagctgcgacgtgaagctggtggaaaagagcttcgagacagacaccaacctgaacttccagaacctgagcgtgatcggcttcagaatcctgctgctgaaagtggccggctttaacctgctgatgaccctgcggctgtggtccagctaa

SEQ ID NO: 8077 - DNA, 1959 bp, synthetic construct
  source 1..1959: mol_type = other DNA
atggccttaccagtgaccgccttgctcctgccgctggccttgctgctccacgccgccaggccggcatgccgcagcgagagccgctacaagggtaccggcggaggcggatctggcggcggaggtagcggtggcggaggatctgaattcgacatccagatgacacagagccctagcagcctgtctgccagcgtgggagacagagtgaccatcacatgcaaggccagcgaccacatcaacaactggctggcctggtatcagcagaagcctggacaggcccctaagctgctgatctacggcgctaccacactggaaacaggcgtgcccagcagattttctggcagcggctctggcaccgactacaccctgacaatatccagcctccagcctgaggacttcgccacctactactgtcagcagagctggaacaccccttggacattcggccagggcaccaagctggaaatcaagagactcgaggacctgaagaacgtgttcccacctgaggtggccgtgttcgagcctagcgaggccgagatcagccacacccagaaagccaccctcgtgtgcctggctaccggcttctaccccgaccatgtggaactgtcttggtgggtcaacggcaaagaggtgcacagcggcgtgtgtaccgacccccagccactgaaagaacagcccgccctgaacgacagccggtactgcctgagcagcagactgagagtgtccgccaccttctggcagaacccccggaaccacttcagatgccaggtgcagttctacggcctgagcgagaacgacgagtggacccaggacagagccaagcccgtgacccagatcgtgtctgccgaagcctggggcagagccgattgcggctttaccagcgagagctaccagcagggcgtgctgagcgccaccatcctgtacgagatcctgctgggcaaggccaccctgtacgccgtgctggtgtctgccctggtgctgatggctatggtcaagcggaaggacagccggggaagggccaagcgatctggatctggagcaacaaacttctcactactcaaacaagcaggtgacgtggaggagaatcccgggcctactagtgccaccatggactggatttggcgcatccttttccttgtcggcgctgctaccggcgcccattccttcgaacaagttcagcttcaacagcctggcgctgagctggtcaaacctggcgcttctgtgaagatgagctgcaaagccagcggctacgccttcagcagctactggatcaactggatgaagcagaaacccggccagggactcgaatggatcggccaaatctatcccggcgacggcgacaccaactacaacggcaagttcaagggcagagccacactgaccgccgatacctctagcagcacagcctacatgcagctgagcagcctgaccagcgaagatagcgccgtgtacttctgtgcccggtccatcacaacagtcgtgggctgcgctatggactattggggccagggaacaagcgtgaccgtgtctagtacgcgtatccagaaccctgatcctgccgtgtaccagctgcgggatagcaagagcagcgacaagagcgtgtgtctgttcaccgacttcgacagccagaccaacgtgtcccagagcaaggactccgacgtgtacatcaccgataagtgcgtgctggacatgcggagcatggacttcaagagcaactccgccgtggcctggtccaacaagtccgatttcgcctgcgccaacgccttcaacaacagcattatccccgaggacacattcttcccaagccccgagagcagctgcgacgtgaagctggtggaaaagagcttcgagacagacaccaacctgaacttccagaacctgagcgtgatcggcttcagaatcctgctgctgaaagtggccggctttaacctgctgatgaccctgcggctgtggtccagctaa

SEQ ID NO: 8078 - DNA, 1959 bp, synthetic construct
  source 1..1959: mol_type = other DNA
atggccttaccagtgaccgccttgctcctgccgctggccttgctgctccacgccgccaggccggcatgccgcagcgagaaccgctacaagggtaccggcggaggcggatctggcggcggaggtagcggtggcggaggatctgaattcgacatccagatgacacagagccctagcagcctgtctgccagcgtgggagacagagtgaccatcacatgcaaggccagcgaccacatcaacaactggctggcctggtatcagcagaagcctggacaggcccctaagctgctgatctacggcgctaccacactggaaacaggcgtgcccagcagattttctggcagcggctctggcaccgactacaccctgacaatatccagcctccagcctgaggacttcgccacctactactgtcagcagagctggaacaccccttggacattcggccagggcaccaagctggaaatcaagagactcgaggacctgaagaacgtgttcccacctgaggtggccgtgttcgagcctagcgaggccgagatcagccacacccagaaagccaccctcgtgtgcctggctaccggcttctaccccgaccatgtggaactgtcttggtgggtcaacggcaaagaggtgcacagcggcgtgtgtaccgacccccagccactgaaagaacagcccgccctgaacgacagccggtactgcctgagcagcagactgagagtgtccgccaccttctggcagaacccccggaaccacttcagatgccaggtgcagttctacggcctgagcgagaacgacgagtggacccaggacagagccaagcccgtgacccagatcgtgtctgccgaagcctggggcagagccgattgcggctttaccagcgagagctaccagcagggcgtgctgagcgccaccatcctgtacgagatcctgctgggcaaggccaccctgtacgccgtgctggtgtctgccctggtgctgatggctatggtcaagcggaaggacagccggggaagggccaagcgatctggatctggagcaacaaacttctcactactcaaacaagcaggtgacgtggaggagaatcccgggcctactagtgccaccatggactggatttggcgcatccttttccttgtcggcgctgctaccggcgcccattccttcgaacaagttcagcttcaacagcctggcgctgagctggtcaaacctggcgcttctgtgaagatgagctgcaaagccagcggctacgccttcagcagctactggatcaactggatgaagcagaaacccggccagggactcgaatggatcggccaaatctatcccggcgacggcgacaccaactacaacggcaagttcaagggcagagccacactgaccgccgatacctctagcagcacagcctacatgcagctgagcagcctgaccagcgaagatagcgccgtgtacttctgtgcccggtccatcacaacagtcgtgggctgcgctatggactattggggccagggaacaagcgtgaccgtgtctagtacgcgtatccagaaccctgatcctgccgtgtaccagctgcgggatagcaagagcagcgacaagagcgtgtgtctgttcaccgacttcgacagccagaccaacgtgtcccagagcaaggactccgacgtgtacatcaccgataagtgcgtgctggacatgcggagcatggacttcaagagcaactccgccgtggcctggtccaacaagtccgatttcgcctgcgccaacgccttcaacaacagcattatccccgaggacacattcttcccaagccccgagagcagctgcgacgtgaagctggtggaaaagagcttcgagacagacaccaacctgaacttccagaacctgagcgtgatcggcttcagaatcctgctgctgaaagtggccggctttaacctgctgatgaccctgcggctgtggtccagctaa

SEQ ID NO: 8079 - DNA, 1959 bp, synthetic construct
  source 1..1959: mol_type = other DNA
atggccttaccagtgaccgccttgctcctgccgctggccttgctgctccacgccgccaggccggcatgccgcagcgagggccgctacaagggtaccggcggaggcggatctggcggcggaggtagcggtggcggaggatctgaattcgacatccagatgacacagagccctagcagcctgtctgccagcgtgggagacagagtgaccatcacatgcaaggccagcgaccacatcaacaactggctggcctggtatcagcagaagcctggacaggcccctaagctgctgatctacggcgctaccacactggaaacaggcgtgcccagcagattttctggcagcggctctggcaccgactacaccctgacaatatccagcctccagcctgaggacttcgccacctactactgtcagcagagctggaacaccccttggacattcggccagggcaccaagctggaaatcaagagactcgaggacctgaagaacgtgttcccacctgaggtggccgtgttcgagcctagcgaggccgagatcagccacacccagaaagccaccctcgtgtgcctggctaccggcttctaccccgaccatgtggaactgtcttggtgggtcaacggcaaagaggtgcacagcggcgtgtgtaccgacccccagccactgaaagaacagcccgccctgaacgacagccggtactgcctgagcagcagactgagagtgtccgccaccttctggcagaacccccggaaccacttcagatgccaggtgcagttctacggcctgagcgagaacgacgagtggacccaggacagagccaagcccgtgacccagatcgtgtctgccgaagcctggggcagagccgattgcggctttaccagcgagagctaccagcagggcgtgctgagcgccaccatcctgtacgagatcctgctgggcaaggccaccctgtacgccgtgctggtgtctgccctggtgctgatggctatggtcaagcggaaggacagccggggaagggccaagcgatctggatctggagcaacaaacttctcactactcaaacaagcaggtgacgtggaggagaatcccgggcctactagtgccaccatggactggatttggcgcatccttttccttgtcggcgctgctaccggcgcccattccttcgaacaagttcagcttcaacagcctggcgctgagctggtcaaacctggcgcttctgtgaagatgagctgcaaagccagcggctacgccttcagcagctactggatcaactggatgaagcagaaacccggccagggactcgaatggatcggccaaatctatcccggcgacggcgacaccaactacaacggcaagttcaagggcagagccacactgaccgccgatacctctagcagcacagcctacatgcagctgagcagcctgaccagcgaagatagcgccgtgtacttctgtgcccggtccatcacaacagtcgtgggctgcgctatggactattggggccagggaacaagcgtgaccgtgtctagtacgcgtatccagaaccctgatcctgccgtgtaccagctgcgggatagcaagagcagcgacaagagcgtgtgtctgttcaccgacttcgacagccagaccaacgtgtcccagagcaaggactccgacgtgtacatcaccgataagtgcgtgctggacatgcggagcatggacttcaagagcaactccgccgtggcctggtccaacaagtccgatttcgcctgcgccaacgccttcaacaacagcattatccccgaggacacattcttcccaagccccgagagcagctgcgacgtgaagctggtggaaaagagcttcgagacagacaccaacctgaacttccagaacctgagcgtgatcggcttcagaatcctgctgctgaaagtggccggctttaacctgctgatgaccctgcggctgtggtccagctaa

SEQ ID NO: 8080 - DNA, 1959 bp, synthetic construct
  source 1..1959: mol_type = other DNA
atggccttaccagtgaccgccttgctcctgccgctggccttgctgctccacgccgccaggccggcatgccgcagcgaggcccgctacaagggtaccggcggaggcggatctggcggcggaggtagcggtggcggaggatctgaattcgacatccagatgacacagagccctagcagcctgtctgccagcgtgggagacagagtgaccatcacatgcaaggccagcgaccacatcaacaactggctggcctggtatcagcagaagcctggacaggcccctaagctgctgatctacggcgctaccacactggaaacaggcgtgcccagcagattttctggcagcggctctggcaccgactacaccctgacaatatccagcctccagcctgaggacttcgccacctactactgtcagcagagctggaacaccccttggacattcggccagggcaccaagctggaaatcaagagactcgaggacctgaagaacgtgttcccacctgaggtggccgtgttcgagcctagcgaggccgagatcagccacacccagaaagccaccctcgtgtgcctggctaccggcttctaccccgaccatgtggaactgtcttggtgggtcaacggcaaagaggtgcacagcggcgtgtgtaccgacccccagccactgaaagaacagcccgccctgaacgacagccggtactgcctgagcagcagactgagagtgtccgccaccttctggcagaacccccggaaccacttcagatgccaggtgcagttctacggcctgagcgagaacgacgagtggacccaggacagagccaagcccgtgacccagatcgtgtctgccgaagcctggggcagagccgattgcggctttaccagcgagagctaccagcagggcgtgctgagcgccaccatcctgtacgagatcctgctgggcaaggccaccctgtacgccgtgctggtgtctgccctggtgctgatggctatggtcaagcggaaggacagccggggaagggccaagcgatctggatctggagcaacaaacttctcactactcaaacaagcaggtgacgtggaggagaatcccgggcctactagtgccaccatggactggatttggcgcatccttttccttgtcggcgctgctaccggcgcccattccttcgaacaagttcagcttcaacagcctggcgctgagctggtcaaacctggcgcttctgtgaagatgagctgcaaagccagcggctacgccttcagcagctactggatcaactggatgaagcagaaacccggccagggactcgaatggatcggccaaatctatcccggcgacggcgacaccaactacaacggcaagttcaagggcagagccacactgaccgccgatacctctagcagcacagcctacatgcagctgagcagcctgaccagcgaagatagcgccgtgtacttctgtgcccggtccatcacaacagtcgtgggctgcgctatggactattggggccagggaacaagcgtgaccgtgtctagtacgcgtatccagaaccctgatcctgccgtgtaccagctgcgggatagcaagagcagcgacaagagcgtgtgtctgttcaccgacttcgacagccagaccaacgtgtcccagagcaaggactccgacgtgtacatcaccgataagtgcgtgctggacatgcggagcatggacttcaagagcaactccgccgtggcctggtccaacaagtccgatttcgcctgcgccaacgccttcaacaacagcattatccccgaggacacattcttcccaagccccgagagcagctgcgacgtgaagctggtggaaaagagcttcgagacagacaccaacctgaacttccagaacctgagcgtgatcggcttcagaatcctgctgctgaaagtggccggctttaacctgctgatgaccctgcggctgtggtccagctaa

SEQ ID NO: 8081 - DNA, 1959 bp, synthetic construct
  source 1..1959: mol_type = other DNA
atggccttaccagtgaccgccttgctcctgccgctggccttgctgctccacgccgccaggccggcatgccgcagcgagaagcgctacaagggtaccggcggaggcggatctggcggcggaggtagcggtggcggaggatctgaattcgacatccagatgacacagagccctagcagcctgtctgccagcgtgggagacagagtgaccatcacatgcaaggccagcgaccacatcaacaactggctggcctggtatcagcagaagcctggacaggcccctaagctgctgatctacggcgctaccacactggaaacaggcgtgcccagcagattttctggcagcggctctggcaccgactacaccctgacaatatccagcctccagcctgaggacttcgccacctactactgtcagcagagctggaacaccccttggacattcggccagggcaccaagctggaaatcaagagactcgaggacctgaagaacgtgttcccacctgaggtggccgtgttcgagcctagcgaggccgagatcagccacacccagaaagccaccctcgtgtgcctggctaccggcttctaccccgaccatgtggaactgtcttggtgggtcaacggcaaagaggtgcacagcggcgtgtgtaccgacccccagccactgaaagaacagcccgccctgaacgacagccggtactgcctgagcagcagactgagagtgtccgccaccttctggcagaacccccggaaccacttcagatgccaggtgcagttctacggcctgagcgagaacgacgagtggacccaggacagagccaagcccgtgacccagatcgtgtctgccgaagcctggggcagagccgattgcggctttaccagcgagagctaccagcagggcgtgctgagcgccaccatcctgtacgagatcctgctgggcaaggccaccctgtacgccgtgctggtgtctgccctggtgctgatggctatggtcaagcggaaggacagccggggaagggccaagcgatctggatctggagcaacaaacttctcactactcaaacaagcaggtgacgtggaggagaatcccgggcctactagtgccaccatggactggatttggcgcatccttttccttgtcggcgctgctaccggcgcccattccttcgaacaagttcagcttcaacagcctggcgctgagctggtcaaacctggcgcttctgtgaagatgagctgcaaagccagcggctacgccttcagcagctactggatcaactggatgaagcagaaacccggccagggactcgaatggatcggccaaatctatcccggcgacggcgacaccaactacaacggcaagttcaagggcagagccacactgaccgccgatacctctagcagcacagcctacatgcagctgagcagcctgaccagcgaagatagcgccgtgtacttctgtgcccggtccatcacaacagtcgtgggctgcgctatggactattggggccagggaacaagcgtgaccgtgtctagtacgcgtatccagaaccctgatcctgccgtgtaccagctgcgggatagcaagagcagcgacaagagcgtgtgtctgttcaccgacttcgacagccagaccaacgtgtcccagagcaaggactccgacgtgtacatcaccgataagtgcgtgctggacatgcggagcatggacttcaagagcaactccgccgtggcctggtccaacaagtccgatttcgcctgcgccaacgccttcaacaacagcattatccccgaggacacattcttcccaagccccgagagcagctgcgacgtgaagctggtggaaaagagcttcgagacagacaccaacctgaacttccagaacctgagcgtgatcggcttcagaatcctgctgctgaaagtggccggctttaacctgctgatgaccctgcggctgtggtccagctaa

SEQ ID NO: 8082 - DNA, 1959 bp, synthetic construct
  source 1..1959: mol_type = other DNA
atggccttaccagtgaccgccttgctcctgccgctggccttgctgctccacgccgccaggccggcatgccgcagcgagctgcgctacaagggtaccggcggaggcggatctggcggcggaggtagcggtggcggaggatctgaattcgacatccagatgacacagagccctagcagcctgtctgccagcgtgggagacagagtgaccatcacatgcaaggccagcgaccacatcaacaactggctggcctggtatcagcagaagcctggacaggcccctaagctgctgatctacggcgctaccacactggaaacaggcgtgcccagcagattttctggcagcggctctggcaccgactacaccctgacaatatccagcctccagcctgaggacttcgccacctactactgtcagcagagctggaacaccccttggacattcggccagggcaccaagctggaaatcaagagactcgaggacctgaagaacgtgttcccacctgaggtggccgtgttcgagcctagcgaggccgagatcagccacacccagaaagccaccctcgtgtgcctggctaccggcttctaccccgaccatgtggaactgtcttggtgggtcaacggcaaagaggtgcacagcggcgtgtgtaccgacccccagccactgaaagaacagcccgccctgaacgacagccggtactgcctgagcagcagactgagagtgtccgccaccttctggcagaacccccggaaccacttcagatgccaggtgcagttctacggcctgagcgagaacgacgagtggacccaggacagagccaagcccgtgacccagatcgtgtctgccgaagcctggggcagagccgattgcggctttaccagcgagagctaccagcagggcgtgctgagcgccaccatcctgtacgagatcctgctgggcaaggccaccctgtacgccgtgctggtgtctgccctggtgctgatggctatggtcaagcggaaggacagccggggaagggccaagcgatctggatctggagcaacaaacttctcactactcaaacaagcaggtgacgtggaggagaatcccgggcctactagtgccaccatggactggatttggcgcatccttttccttgtcggcgctgctaccggcgcccattccttcgaacaagttcagcttcaacagcctggcgctgagctggtcaaacctggcgcttctgtgaagatgagctgcaaagccagcggctacgccttcagcagctactggatcaactggatgaagcagaaacccggccagggactcgaatggatcggccaaatctatcccggcgacggcgacaccaactacaacggcaagttcaagggcagagccacactgaccgccgatacctctagcagcacagcctacatgcagctgagcagcctgaccagcgaagatagcgccgtgtacttctgtgcccggtccatcacaacagtcgtgggctgcgctatggactattggggccagggaacaagcgtgaccgtgtctagtacgcgtatccagaaccctgatcctgccgtgtaccagctgcgggatagcaagagcagcgacaagagcgtgtgtctgttcaccgacttcgacagccagaccaacgtgtcccagagcaaggactccgacgtgtacatcaccgataagtgcgtgctggacatgcggagcatggacttcaagagcaactccgccgtggcctggtccaacaagtccgatttcgcctgcgccaacgccttcaacaacagcattatccccgaggacacattcttcccaagccccgagagcagctgcgacgtgaagctggtggaaaagagcttcgagacagacaccaacctgaacttccagaacctgagcgtgatcggcttcagaatcctgctgctgaaagtggccggctttaacctgctgatgaccctgcggctgtggtccagctaa

SEQ ID NO: 8083 - DNA, 1959 bp, synthetic construct
  source 1..1959: mol_type = other DNA
atggccttaccagtgaccgccttgctcctgccgctggccttgctgctccacgccgccaggccggcatgccgcagcgagacccgctacaagggtaccggcggaggcggatctggcggcggaggtagcggtggcggaggatctgaattcgacatccagatgacacagagccctagcagcctgtctgccagcgtgggagacagagtgaccatcacatgcaaggccagcgaccacatcaacaactggctggcctggtatcagcagaagcctggacaggcccctaagctgctgatctacggcgctaccacactggaaacaggcgtgcccagcagattttctggcagcggctctggcaccgactacaccctgacaatatccagcctccagcctgaggacttcgccacctactactgtcagcagagctggaacaccccttggacattcggccagggcaccaagctggaaatcaagagactcgaggacctgaagaacgtgttcccacctgaggtggccgtgttcgagcctagcgaggccgagatcagccacacccagaaagccaccctcgtgtgcctggctaccggcttctaccccgaccatgtggaactgtcttggtgggtcaacggcaaagaggtgcacagcggcgtgtgtaccgacccccagccactgaaagaacagcccgccctgaacgacagccggtactgcctgagcagcagactgagagtgtccgccaccttctggcagaacccccggaaccacttcagatgccaggtgcagttctacggcctgagcgagaacgacgagtggacccaggacagagccaagcccgtgacccagatcgtgtctgccgaagcctggggcagagccgattgcggctttaccagcgagagctaccagcagggcgtgctgagcgccaccatcctgtacgagatcctgctgggcaaggccaccctgtacgccgtgctggtgtctgccctggtgctgatggctatggtcaagcggaaggacagccggggaagggccaagcgatctggatctggagcaacaaacttctcactactcaaacaagcaggtgacgtggaggagaatcccgggcctactagtgccaccatggactggatttggcgcatccttttccttgtcggcgctgctaccggcgcccattccttcgaacaagttcagcttcaacagcctggcgctgagctggtcaaacctggcgcttctgtgaagatgagctgcaaagccagcggctacgccttcagcagctactggatcaactggatgaagcagaaacccggccagggactcgaatggatcggccaaatctatcccggcgacggcgacaccaactacaacggcaagttcaagggcagagccacactgaccgccgatacctctagcagcacagcctacatgcagctgagcagcctgaccagcgaagatagcgccgtgtacttctgtgcccggtccatcacaacagtcgtgggctgcgctatggactattggggccagggaacaagcgtgaccgtgtctagtacgcgtatccagaaccctgatcctgccgtgtaccagctgcgggatagcaagagcagcgacaagagcgtgtgtctgttcaccgacttcgacagccagaccaacgtgtcccagagcaaggactccgacgtgtacatcaccgataagtgcgtgctggacatgcggagcatggacttcaagagcaactccgccgtggcctggtccaacaagtccgatttcgcctgcgccaacgccttcaacaacagcattatccccgaggacacattcttcccaagccccgagagcagctgcgacgtgaagctggtggaaaagagcttcgagacagacaccaacctgaacttccagaacctgagcgtgatcggcttcagaatcctgctgctgaaagtggccggctttaacctgctgatgaccctgcggctgtggtccagctaa

SEQ ID NO: 8084 - DNA, 1959 bp, synthetic construct
  source 1..1959: mol_type = other DNA
atggccttaccagtgaccgccttgctcctgccgctggccttgctgctccacgccgccaggccggcatgccgcagcgagcagcgctacaagggtaccggcggaggcggatctggcggcggaggtagcggtggcggaggatctgaattcgacatccagatgacacagagccctagcagcctgtctgccagcgtgggagacagagtgaccatcacatgcaaggccagcgaccacatcaacaactggctggcctggtatcagcagaagcctggacaggcccctaagctgctgatctacggcgctaccacactggaaacaggcgtgcccagcagattttctggcagcggctctggcaccgactacaccctgacaatatccagcctccagcctgaggacttcgccacctactactgtcagcagagctggaacaccccttggacattcggccagggcaccaagctggaaatcaagagactcgaggacctgaagaacgtgttcccacctgaggtggccgtgttcgagcctagcgaggccgagatcagccacacccagaaagccaccctcgtgtgcctggctaccggcttctaccccgaccatgtggaactgtcttggtgggtcaacggcaaagaggtgcacagcggcgtgtgtaccgacccccagccactgaaagaacagcccgccctgaacgacagccggtactgcctgagcagcagactgagagtgtccgccaccttctggcagaacccccggaaccacttcagatgccaggtgcagttctacggcctgagcgagaacgacgagtggacccaggacagagccaagcccgtgacccagatcgtgtctgccgaagcctggggcagagccgattgcggctttaccagcgagagctaccagcagggcgtgctgagcgccaccatcctgtacgagatcctgctgggcaaggccaccctgtacgccgtgctggtgtctgccctggtgctgatggctatggtcaagcggaaggacagccggggaagggccaagcgatctggatctggagcaacaaacttctcactactcaaacaagcaggtgacgtggaggagaatcccgggcctactagtgccaccatggactggatttggcgcatccttttccttgtcggcgctgctaccggcgcccattccttcgaacaagttcagcttcaacagcctggcgctgagctggtcaaacctggcgcttctgtgaagatgagctgcaaagccagcggctacgccttcagcagctactggatcaactggatgaagcagaaacccggccagggactcgaatggatcggccaaatctatcccggcgacggcgacaccaactacaacggcaagttcaagggcagagccacactgaccgccgatacctctagcagcacagcctacatgcagctgagcagcctgaccagcgaagatagcgccgtgtacttctgtgcccggtccatcacaacagtcgtgggctgcgctatggactattggggccagggaacaagcgtgaccgtgtctagtacgcgtatccagaaccctgatcctgccgtgtaccagctgcgggatagcaagagcagcgacaagagcgtgtgtctgttcaccgacttcgacagccagaccaacgtgtcccagagcaaggactccgacgtgtacatcaccgataagtgcgtgctggacatgcggagcatggacttcaagagcaactccgccgtggcctggtccaacaagtccgatttcgcctgcgccaacgccttcaacaacagcattatccccgaggacacattcttcccaagccccgagagcagctgcgacgtgaagctggtggaaaagagcttcgagacagacaccaacctgaacttccagaacctgagcgtgatcggcttcagaatcctgctgctgaaagtggccggctttaacctgctgatgaccctgcggctgtggtccagctaa

SEQ ID NO: 8085 - DNA, 1959 bp, synthetic construct
  source 1..1959: mol_type = other DNA
atggccttaccagtgaccgccttgctcctgccgctggccttgctgctccacgccgccaggccggcatgcgcccgcagcgaggaccgctacggtaccggcggaggcggatctggcggcggaggtagcggtggcggaggatctgaattcgacatccagatgacacagagccctagcagcctgtctgccagcgtgggagacagagtgaccatcacatgcaaggccagcgaccacatcaacaactggctggcctggtatcagcagaagcctggacaggcccctaagctgctgatctacggcgctaccacactggaaacaggcgtgcccagcagattttctggcagcggctctggcaccgactacaccctgacaatatccagcctccagcctgaggacttcgccacctactactgtcagcagagctggaacaccccttggacattcggccagggcaccaagctggaaatcaagagactcgaggacctgaagaacgtgttcccacctgaggtggccgtgttcgagcctagcgaggccgagatcagccacacccagaaagccaccctcgtgtgcctggctaccggcttctaccccgaccatgtggaactgtcttggtgggtcaacggcaaagaggtgcacagcggcgtgtgtaccgacccccagccactgaaagaacagcccgccctgaacgacagccggtactgcctgagcagcagactgagagtgtccgccaccttctggcagaacccccggaaccacttcagatgccaggtgcagttctacggcctgagcgagaacgacgagtggacccaggacagagccaagcccgtgacccagatcgtgtctgccgaagcctggggcagagccgattgcggctttaccagcgagagctaccagcagggcgtgctgagcgccaccatcctgtacgagatcctgctgggcaaggccaccctgtacgccgtgctggtgtctgccctggtgctgatggctatggtcaagcggaaggacagccggggaagggccaagcgatctggatctggagcaacaaacttctcactactcaaacaagcaggtgacgtggaggagaatcccgggcctactagtgccaccatggactggatttggcgcatccttttccttgtcggcgctgctaccggcgcccattccttcgaacaagttcagcttcaacagcctggcgctgagctggtcaaacctggcgcttctgtgaagatgagctgcaaagccagcggctacgccttcagcagctactggatcaactggatgaagcagaaacccggccagggactcgaatggatcggccaaatctatcccggcgacggcgacaccaactacaacggcaagttcaagggcagagccacactgaccgccgatacctctagcagcacagcctacatgcagctgagcagcctgaccagcgaagatagcgccgtgtacttctgtgcccggtccatcacaacagtcgtgggctgcgctatggactattggggccagggaacaagcgtgaccgtgtctagtacgcgtatccagaaccctgatcctgccgtgtaccagctgcgggatagcaagagcagcgacaagagcgtgtgtctgttcaccgacttcgacagccagaccaacgtgtcccagagcaaggactccgacgtgtacatcaccgataagtgcgtgctggacatgcggagcatggacttcaagagcaactccgccgtggcctggtccaacaagtccgatttcgcctgcgccaacgccttcaacaacagcattatccccgaggacacattcttcccaagccccgagagcagctgcgacgtgaagctggtggaaaagagcttcgagacagacaccaacctgaacttccagaacctgagcgtgatcggcttcagaatcctgctgctgaaagtggccggctttaacctgctgatgaccctgcggctgtggtccagctaa

SEQ ID NO: 8086 - DNA, 1962 bp, synthetic construct
  source 1..1962: mol_type = other DNA
atggccttaccagtgaccgccttgctcctgccgctggccttgctgctccacgccgccaggccggcatgcgcccgcagcgaggaccgctaccgcggtaccggcggaggcggatctggcggcggaggtagcggtggcggaggatctgaattcgacatccagatgacacagagccctagcagcctgtctgccagcgtgggagacagagtgaccatcacatgcaaggccagcgaccacatcaacaactggctggcctggtatcagcagaagcctggacaggcccctaagctgctgatctacggcgctaccacactggaaacaggcgtgcccagcagattttctggcagcggctctggcaccgactacaccctgacaatatccagcctccagcctgaggacttcgccacctactactgtcagcagagctggaacaccccttggacattcggccagggcaccaagctggaaatcaagagactcgaggacctgaagaacgtgttcccacctgaggtggccgtgttcgagcctagcgaggccgagatcagccacacccagaaagccaccctcgtgtgcctggctaccggcttctaccccgaccatgtggaactgtcttggtgggtcaacggcaaagaggtgcacagcggcgtgtgtaccgacccccagccactgaaagaacagcccgccctgaacgacagccggtactgcctgagcagcagactgagagtgtccgccaccttctggcagaacccccggaaccacttcagatgccaggtgcagttctacggcctgagcgagaacgacgagtggacccaggacagagccaagcccgtgacccagatcgtgtctgccgaagcctggggcagagccgattgcggctttaccagcgagagctaccagcagggcgtgctgagcgccaccatcctgtacgagatcctgctgggcaaggccaccctgtacgccgtgctggtgtctgccctggtgctgatggctatggtcaagcggaaggacagccggggaagggccaagcgatctggatctggagcaacaaacttctcactactcaaacaagcaggtgacgtggaggagaatcccgggcctactagtgccaccatggactggatttggcgcatccttttccttgtcggcgctgctaccggcgcccattccttcgaacaagttcagcttcaacagcctggcgctgagctggtcaaacctggcgcttctgtgaagatgagctgcaaagccagcggctacgccttcagcagctactggatcaactggatgaagcagaaacccggccagggactcgaatggatcggccaaatctatcccggcgacggcgacaccaactacaacggcaagttcaagggcagagccacactgaccgccgatacctctagcagcacagcctacatgcagctgagcagcctgaccagcgaagatagcgccgtgtacttctgtgcccggtccatcacaacagtcgtgggctgcgctatggactattggggccagggaacaagcgtgaccgtgtctagtacgcgtatccagaaccctgatcctgccgtgtaccagctgcgggatagcaagagcagcgacaagagcgtgtgtctgttcaccgacttcgacagccagaccaacgtgtcccagagcaaggactccgacgtgtacatcaccgataagtgcgtgctggacatgcggagcatggacttcaagagcaactccgccgtggcctggtccaacaagtccgatttcgcctgcgccaacgccttcaacaacagcattatccccgaggacacattcttcccaagccccgagagcagctgcgacgtgaagctggtggaaaagagcttcgagacagacaccaacctgaacttccagaacctgagcgtgatcggcttcagaatcctgctgctgaaagtggccggctttaacctgctgatgaccctgcggctgtggtccagctaa

SEQ ID NO: 8087 - DNA, 1965 bp, synthetic construct
  source 1..1965: mol_type = other DNA
atggccttaccagtgaccgccttgctcctgccgctggccttgctgctccacgccgccaggccggcatgcgcccgcagcgaggaccgctaccgcaacggtaccggcggaggcggatctggcggcggaggtagcggtggcggaggatctgaattcgacatccagatgacacagagccctagcagcctgtctgccagcgtgggagacagagtgaccatcacatgcaaggccagcgaccacatcaacaactggctggcctggtatcagcagaagcctggacaggcccctaagctgctgatctacggcgctaccacactggaaacaggcgtgcccagcagattttctggcagcggctctggcaccgactacaccctgacaatatccagcctccagcctgaggacttcgccacctactactgtcagcagagctggaacaccccttggacattcggccagggcaccaagctggaaatcaagagactcgaggacctgaagaacgtgttcccacctgaggtggccgtgttcgagcctagcgaggccgagatcagccacacccagaaagccaccctcgtgtgcctggctaccggcttctaccccgaccatgtggaactgtcttggtgggtcaacggcaaagaggtgcacagcggcgtgtgtaccgacccccagccactgaaagaacagcccgccctgaacgacagccggtactgcctgagcagcagactgagagtgtccgccaccttctggcagaacccccggaaccacttcagatgccaggtgcagttctacggcctgagcgagaacgacgagtggacccaggacagagccaagcccgtgacccagatcgtgtctgccgaagcctggggcagagccgattgcggctttaccagcgagagctaccagcagggcgtgctgagcgccaccatcctgtacgagatcctgctgggcaaggccaccctgtacgccgtgctggtgtctgccctggtgctgatggctatggtcaagcggaaggacagccggggaagggccaagcgatctggatctggagcaacaaacttctcactactcaaacaagcaggtgacgtggaggagaatcccgggcctactagtgccaccatggactggatttggcgcatccttttccttgtcggcgctgctaccggcgcccattccttcgaacaagttcagcttcaacagcctggcgctgagctggtcaaacctggcgcttctgtgaagatgagctgcaaagccagcggctacgccttcagcagctactggatcaactggatgaagcagaaacccggccagggactcgaatggatcggccaaatctatcccggcgacggcgacaccaactacaacggcaagttcaagggcagagccacactgaccgccgatacctctagcagcacagcctacatgcagctgagcagcctgaccagcgaagatagcgccgtgtacttctgtgcccggtccatcacaacagtcgtgggctgcgctatggactattggggccagggaacaagcgtgaccgtgtctagtacgcgtatccagaaccctgatcctgccgtgtaccagctgcgggatagcaagagcagcgacaagagcgtgtgtctgttcaccgacttcgacagccagaccaacgtgtcccagagcaaggactccgacgtgtacatcaccgataagtgcgtgctggacatgcggagcatggacttcaagagcaactccgccgtggcctggtccaacaagtccgatttcgcctgcgccaacgccttcaacaacagcattatccccgaggacacattcttcccaagccccgagagcagctgcgacgtgaagctggtggaaaagagcttcgagacagacaccaacctgaacttccagaacctgagcgtgatcggcttcagaatcctgctgctgaaagtggccggctttaacctgctgatgaccctgcggctgtggtccagctaa

SEQ ID NO: 8088 - DNA, 1968 bp, synthetic construct
  source 1..1968: mol_type = other DNA
atggccttaccagtgaccgccttgctcctgccgctggccttgctgctccacgccgccaggccggcatgcgcccgcagcgaggaccgctaccgcaaccccggtaccggcggaggcggatctggcggcggaggtagcggtggcggaggatctgaattcgacatccagatgacacagagccctagcagcctgtctgccagcgtgggagacagagtgaccatcacatgcaaggccagcgaccacatcaacaactggctggcctggtatcagcagaagcctggacaggcccctaagctgctgatctacggcgctaccacactggaaacaggcgtgcccagcagattttctggcagcggctctggcaccgactacaccctgacaatatccagcctccagcctgaggacttcgccacctactactgtcagcagagctggaacaccccttggacattcggccagggcaccaagctggaaatcaagagactcgaggacctgaagaacgtgttcccacctgaggtggccgtgttcgagcctagcgaggccgagatcagccacacccagaaagccaccctcgtgtgcctggctaccggcttctaccccgaccatgtggaactgtcttggtgggtcaacggcaaagaggtgcacagcggcgtgtgtaccgacccccagccactgaaagaacagcccgccctgaacgacagccggtactgcctgagcagcagactgagagtgtccgccaccttctggcagaacccccggaaccacttcagatgccaggtgcagttctacggcctgagcgagaacgacgagtggacccaggacagagccaagcccgtgacccagatcgtgtctgccgaagcctggggcagagccgattgcggctttaccagcgagagctaccagcagggcgtgctgagcgccaccatcctgtacgagatcctgctgggcaaggccaccctgtacgccgtgctggtgtctgccctggtgctgatggctatggtcaagcggaaggacagccggggaagggccaagcgatctggatctggagcaacaaacttctcactactcaaacaagcaggtgacgtggaggagaatcccgggcctactagtgccaccatggactggatttggcgcatccttttccttgtcggcgctgctaccggcgcccattccttcgaacaagttcagcttcaacagcctggcgctgagctggtcaaacctggcgcttctgtgaagatgagctgcaaagccagcggctacgccttcagcagctactggatcaactggatgaagcagaaacccggccagggactcgaatggatcggccaaatctatcccggcgacggcgacaccaactacaacggcaagttcaagggcagagccacactgaccgccgatacctctagcagcacagcctacatgcagctgagcagcctgaccagcgaagatagcgccgtgtacttctgtgcccggtccatcacaacagtcgtgggctgcgctatggactattggggccagggaacaagcgtgaccgtgtctagtacgcgtatccagaaccctgatcctgccgtgtaccagctgcgggatagcaagagcagcgacaagagcgtgtgtctgttcaccgacttcgacagccagaccaacgtgtcccagagcaaggactccgacgtgtacatcaccgataagtgcgtgctggacatgcggagcatggacttcaagagcaactccgccgtggcctggtccaacaagtccgatttcgcctgcgccaacgccttcaacaacagcattatccccgaggacacattcttcccaagccccgagagcagctgcgacgtgaagctggtggaaaagagcttcgagacagacaccaacctgaacttccagaacctgagcgtgatcggcttcagaatcctgctgctgaaagtggccggctttaacctgctgatgaccctgcggctgtggtccagctaa

SEQ ID NO: 8089 - DNA, 1971 bp, synthetic construct
  source 1..1971: mol_type = other DNA
atggccttaccagtgaccgccttgctcctgccgctggccttgctgctccacgccgccaggccggcatgcgcccgcagcgaggaccgctaccgcaaccccaagggtaccggcggaggcggatctggcggcggaggtagcggtggcggaggatctgaattcgacatccagatgacacagagccctagcagcctgtctgccagcgtgggagacagagtgaccatcacatgcaaggccagcgaccacatcaacaactggctggcctggtatcagcagaagcctggacaggcccctaagctgctgatctacggcgctaccacactggaaacaggcgtgcccagcagattttctggcagcggctctggcaccgactacaccctgacaatatccagcctccagcctgaggacttcgccacctactactgtcagcagagctggaacaccccttggacattcggccagggcaccaagctggaaatcaagagactcgaggacctgaagaacgtgttcccacctgaggtggccgtgttcgagcctagcgaggccgagatcagccacacccagaaagccaccctcgtgtgcctggctaccggcttctaccccgaccatgtggaactgtcttggtgggtcaacggcaaagaggtgcacagcggcgtgtgtaccgacccccagccactgaaagaacagcccgccctgaacgacagccggtactgcctgagcagcagactgagagtgtccgccaccttctggcagaacccccggaaccacttcagatgccaggtgcagttctacggcctgagcgagaacgacgagtggacccaggacagagccaagcccgtgacccagatcgtgtctgccgaagcctggggcagagccgattgcggctttaccagcgagagctaccagcagggcgtgctgagcgccaccatcctgtacgagatcctgctgggcaaggccaccctgtacgccgtgctggtgtctgccctggtgctgatggctatggtcaagcggaaggacagccggggaagggccaagcgatctggatctggagcaacaaacttctcactactcaaacaagcaggtgacgtggaggagaatcccgggcctactagtgccaccatggactggatttggcgcatccttttccttgtcggcgctgctaccggcgcccattccttcgaacaagttcagcttcaacagcctggcgctgagctggtcaaacctggcgcttctgtgaagatgagctgcaaagccagcggctacgccttcagcagctactggatcaactggatgaagcagaaacccggccagggactcgaatggatcggccaaatctatcccggcgacggcgacaccaactacaacggcaagttcaagggcagagccacactgaccgccgatacctctagcagcacagcctacatgcagctgagcagcctgaccagcgaagatagcgccgtgtacttctgtgcccggtccatcacaacagtcgtgggctgcgctatggactattggggccagggaacaagcgtgaccgtgtctagtacgcgtatccagaaccctgatcctgccgtgtaccagctgcgggatagcaagagcagcgacaagagcgtgtgtctgttcaccgacttcgacagccagaccaacgtgtcccagagcaaggactccgacgtgtacatcaccgataagtgcgtgctggacatgcggagcatggacttcaagagcaactccgccgtggcctggtccaacaagtccgatttcgcctgcgccaacgccttcaacaacagcattatccccgaggacacattcttcccaagccccgagagcagctgcgacgtgaagctggtggaaaagagcttcgagacagacaccaacctgaacttccagaacctgagcgtgatcggcttcagaatcctgctgctgaaagtggccggctttaacctgctgatgaccctgcggctgtggtccagctaa

SEQ ID NO: 8090 - DNA, 1974 bp, synthetic construct
  source 1..1974: mol_type = other DNA
atggccttaccagtgaccgccttgctcctgccgctggccttgctgctccacgccgccaggccggcatgcgcccgcagcgaggaccgctaccgcaaccccaagggcggtaccggcggaggcggatctggcggcggaggtagcggtggcggaggatctgaattcgacatccagatgacacagagccctagcagcctgtctgccagcgtgggagacagagtgaccatcacatgcaaggccagcgaccacatcaacaactggctggcctggtatcagcagaagcctggacaggcccctaagctgctgatctacggcgctaccacactggaaacaggcgtgcccagcagattttctggcagcggctctggcaccgactacaccctgacaatatccagcctccagcctgaggacttcgccacctactactgtcagcagagctggaacaccccttggacattcggccagggcaccaagctggaaatcaagagactcgaggacctgaagaacgtgttcccacctgaggtggccgtgttcgagcctagcgaggccgagatcagccacacccagaaagccaccctcgtgtgcctggctaccggcttctaccccgaccatgtggaactgtcttggtgggtcaacggcaaagaggtgcacagcggcgtgtgtaccgacccccagccactgaaagaacagcccgccctgaacgacagccggtactgcctgagcagcagactgagagtgtccgccaccttctggcagaacccccggaaccacttcagatgccaggtgcagttctacggcctgagcgagaacgacgagtggacccaggacagagccaagcccgtgacccagatcgtgtctgccgaagcctggggcagagccgattgcggctttaccagcgagagctaccagcagggcgtgctgagcgccaccatcctgtacgagatcctgctgggcaaggccaccctgtacgccgtgctggtgtctgccctggtgctgatggctatggtcaagcggaaggacagccggggaagggccaagcgatctggatctggagcaacaaacttctcactactcaaacaagcaggtgacgtggaggagaatcccgggcctactagtgccaccatggactggatttggcgcatccttttccttgtcggcgctgctaccggcgcccattccttcgaacaagttcagcttcaacagcctggcgctgagctggtcaaacctggcgcttctgtgaagatgagctgcaaagccagcggctacgccttcagcagctactggatcaactggatgaagcagaaacccggccagggactcgaatggatcggccaaatctatcccggcgacggcgacaccaactacaacggcaagttcaagggcagagccacactgaccgccgatacctctagcagcacagcctacatgcagctgagcagcctgaccagcgaagatagcgccgtgtacttctgtgcccggtccatcacaacagtcgtgggctgcgctatggactattggggccagggaacaagcgtgaccgtgtctagtacgcgtatccagaaccctgatcctgccgtgtaccagctgcgggatagcaagagcagcgacaagagcgtgtgtctgttcaccgacttcgacagccagaccaacgtgtcccagagcaaggactccgacgtgtacatcaccgataagtgcgtgctggacatgcggagcatggacttcaagagcaactccgccgtggcctggtccaacaagtccgatttcgcctgcgccaacgccttcaacaacagcattatccccgaggacacattcttcccaagccccgagagcagctgcgacgtgaagctggtggaaaagagcttcgagacagacaccaacctgaacttccagaacctgagcgtgatcggcttcagaatcctgctgctgaaagtggccggctttaacctgctgatgaccctgcggctgtggtccagctaa

SEQ ID NO: 8091 - DNA, 1977 bp, synthetic construct
  source 1..1977: mol_type = other DNA
atggccttaccagtgaccgccttgctcctgccgctggccttgctgctccacgccgccaggccggcatgcgcccgcagcgaggaccgctaccgcaaccccaagggcagcggtaccggcggaggcggatctggcggcggaggtagcggtggcggaggatctgaattcgacatccagatgacacagagccctagcagcctgtctgccagcgtgggagacagagtgaccatcacatgcaaggccagcgaccacatcaacaactggctggcctggtatcagcagaagcctggacaggcccctaagctgctgatctacggcgctaccacactggaaacaggcgtgcccagcagattttctggcagcggctctggcaccgactacaccctgacaatatccagcctccagcctgaggacttcgccacctactactgtcagcagagctggaacaccccttggacattcggccagggcaccaagctggaaatcaagagactcgaggacctgaagaacgtgttcccacctgaggtggccgtgttcgagcctagcgaggccgagatcagccacacccagaaagccaccctcgtgtgcctggctaccggcttctaccccgaccatgtggaactgtcttggtgggtcaacggcaaagaggtgcacagcggcgtgtgtaccgacccccagccactgaaagaacagcccgccctgaacgacagccggtactgcctgagcagcagactgagagtgtccgccaccttctggcagaacccccggaaccacttcagatgccaggtgcagttctacggcctgagcgagaacgacgagtggacccaggacagagccaagcccgtgacccagatcgtgtctgccgaagcctggggcagagccgattgcggctttaccagcgagagctaccagcagggcgtgctgagcgccaccatcctgtacgagatcctgctgggcaaggccaccctgtacgccgtgctggtgtctgccctggtgctgatggctatggtcaagcggaaggacagccggggaagggccaagcgatctggatctggagcaacaaacttctcactactcaaacaagcaggtgacgtggaggagaatcccgggcctactagtgccaccatggactggatttggcgcatccttttccttgtcggcgctgctaccggcgcccattccttcgaacaagttcagcttcaacagcctggcgctgagctggtcaaacctggcgcttctgtgaagatgagctgcaaagccagcggctacgccttcagcagctactggatcaactggatgaagcagaaacccggccagggactcgaatggatcggccaaatctatcccggcgacggcgacaccaactacaacggcaagttcaagggcagagccacactgaccgccgatacctctagcagcacagcctacatgcagctgagcagcctgaccagcgaagatagcgccgtgtacttctgtgcccggtccatcacaacagtcgtgggctgcgctatggactattggggccagggaacaagcgtgaccgtgtctagtacgcgtatccagaaccctgatcctgccgtgtaccagctgcgggatagcaagagcagcgacaagagcgtgtgtctgttcaccgacttcgacagccagaccaacgtgtcccagagcaaggactccgacgtgtacatcaccgataagtgcgtgctggacatgcggagcatggacttcaagagcaactccgccgtggcctggtccaacaagtccgatttcgcctgcgccaacgccttcaacaacagcattatccccgaggacacattcttcccaagccccgagagcagctgcgacgtgaagctggtggaaaagagcttcgagacagacaccaacctgaacttccagaacctgagcgtgatcggcttcagaatcctgctgctgaaagtggccggctttaacctgctgatgaccctgcggctgtggtccagctaa

SEQ ID NO: 8092 - DNA, 1980 bp, synthetic construct
  source 1..1980: mol_type = other DNA
atggccttaccagtgaccgccttgctcctgccgctggccttgctgctccacgccgccaggccggcatgcgcccgcagcgaggaccgctaccgcaaccccaagggcagcgccggtaccggcggaggcggatctggcggcggaggtagcggtggcggaggatctgaattcgacatccagatgacacagagccctagcagcctgtctgccagcgtgggagacagagtgaccatcacatgcaaggccagcgaccacatcaacaactggctggcctggtatcagcagaagcctggacaggcccctaagctgctgatctacggcgctaccacactggaaacaggcgtgcccagcagattttctggcagcggctctggcaccgactacaccctgacaatatccagcctccagcctgaggacttcgccacctactactgtcagcagagctggaacaccccttggacattcggccagggcaccaagctggaaatcaagagactcgaggacctgaagaacgtgttcccacctgaggtggccgtgttcgagcctagcgaggccgagatcagccacacccagaaagccaccctcgtgtgcctggctaccggcttctaccccgaccatgtggaactgtcttggtgggtcaacggcaaagaggtgcacagcggcgtgtgtaccgacccccagccactgaaagaacagcccgccctgaacgacagccggtactgcctgagcagcagactgagagtgtccgccaccttctggcagaacccccggaaccacttcagatgccaggtgcagttctacggcctgagcgagaacgacgagtggacccaggacagagccaagcccgtgacccagatcgtgtctgccgaagcctggggcagagccgattgcggctttaccagcgagagctaccagcagggcgtgctgagcgccaccatcctgtacgagatcctgctgggcaaggccaccctgtacgccgtgctggtgtctgccctggtgctgatggctatggtcaagcggaaggacagccggggaagggccaagcgatctggatctggagcaacaaacttctcactactcaaacaagcaggtgacgtggaggagaatcccgggcctactagtgccaccatggactggatttggcgcatccttttccttgtcggcgctgctaccggcgcccattccttcgaacaagttcagcttcaacagcctggcgctgagctggtcaaacctggcgcttctgtgaagatgagctgcaaagccagcggctacgccttcagcagctactggatcaactggatgaagcagaaacccggccagggactcgaatggatcggccaaatctatcccggcgacggcgacaccaactacaacggcaagttcaagggcagagccacactgaccgccgatacctctagcagcacagcctacatgcagctgagcagcctgaccagcgaagatagcgccgtgtacttctgtgcccggtccatcacaacagtcgtgggctgcgctatggactattggggccagggaacaagcgtgaccgtgtctagtacgcgtatccagaaccctgatcctgccgtgtaccagctgcgggatagcaagagcagcgacaagagcgtgtgtctgttcaccgacttcgacagccagaccaacgtgtcccagagcaaggactccgacgtgtacatcaccgataagtgcgtgctggacatgcggagcatggacttcaagagcaactccgccgtggcctggtccaacaagtccgatttcgcctgcgccaacgccttcaacaacagcattatccccgaggacacattcttcccaagccccgagagcagctgcgacgtgaagctggtggaaaagagcttcgagacagacaccaacctgaacttccagaacctgagcgtgatcggcttcagaatcctgctgctgaaagtggccggctttaacctgctgatgaccctgcggctgtggtccagctaa

SEQ ID NO: 8093 - DNA, 1983 bp, synthetic construct
  source 1..1983: mol_type = other DNA
atggccttaccagtgaccgccttgctcctgccgctggccttgctgctccacgccgccaggccggcatgcgcccgcagcgaggaccgctaccgcaaccccaagggcagcgcctgcggtaccggcggaggcggatctggcggcggaggtagcggtggcggaggatctgaattcgacatccagatgacacagagccctagcagcctgtctgccagcgtgggagacagagtgaccatcacatgcaaggccagcgaccacatcaacaactggctggcctggtatcagcagaagcctggacaggcccctaagctgctgatctacggcgctaccacactggaaacaggcgtgcccagcagattttctggcagcggctctggcaccgactacaccctgacaatatccagcctccagcctgaggacttcgccacctactactgtcagcagagctggaacaccccttggacattcggccagggcaccaagctggaaatcaagagactcgaggacctgaagaacgtgttcccacctgaggtggccgtgttcgagcctagcgaggccgagatcagccacacccagaaagccaccctcgtgtgcctggctaccggcttctaccccgaccatgtggaactgtcttggtgggtcaacggcaaagaggtgcacagcggcgtgtgtaccgacccccagccactgaaagaacagcccgccctgaacgacagccggtactgcctgagcagcagactgagagtgtccgccaccttctggcagaacccccggaaccacttcagatgccaggtgcagttctacggcctgagcgagaacgacgagtggacccaggacagagccaagcccgtgacccagatcgtgtctgccgaagcctggggcagagccgattgcggctttaccagcgagagctaccagcagggcgtgctgagcgccaccatcctgtacgagatcctgctgggcaaggccaccctgtacgccgtgctggtgtctgccctggtgctgatggctatggtcaagcggaaggacagccggggaagggccaagcgatctggatctggagcaacaaacttctcactactcaaacaagcaggtgacgtggaggagaatcccgggcctactagtgccaccatggactggatttggcgcatccttttccttgtcggcgctgctaccggcgcccattccttcgaacaagttcagcttcaacagcctggcgctgagctggtcaaacctggcgcttctgtgaagatgagctgcaaagccagcggctacgccttcagcagctactggatcaactggatgaagcagaaacccggccagggactcgaatggatcggccaaatctatcccggcgacggcgacaccaactacaacggcaagttcaagggcagagccacactgaccgccgatacctctagcagcacagcctacatgcagctgagcagcctgaccagcgaagatagcgccgtgtacttctgtgcccggtccatcacaacagtcgtgggctgcgctatggactattggggccagggaacaagcgtgaccgtgtctagtacgcgtatccagaaccctgatcctgccgtgtaccagctgcgggatagcaagagcagcgacaagagcgtgtgtctgttcaccgacttcgacagccagaccaacgtgtcccagagcaaggactccgacgtgtacatcaccgataagtgcgtgctggacatgcggagcatggacttcaagagcaactccgccgtggcctggtccaacaagtccgatttcgcctgcgccaacgccttcaacaacagcattatccccgaggacacattcttcccaagccccgagagcagctgcgacgtgaagctggtggaaaagagcttcgagacagacaccaacctgaacttccagaacctgagcgtgatcggcttcagaatcctgctgctgaaagtggccggctttaacctgctgatgaccctgcggctgtggtccagctaa

SEQ ID NO: 8094 - DNA, 1986 bp, synthetic construct
  source 1..1986: mol_type = other DNA
atggccttaccagtgaccgccttgctcctgccgctggccttgctgctccacgccgccaggccggcatgcgcccgcagcgaggaccgctaccgcaaccccaagggcagcgcctgcaagggtaccggcggaggcggatctggcggcggaggtagcggtggcggaggatctgaattcgacatccagatgacacagagccctagcagcctgtctgccagcgtgggagacagagtgaccatcacatgcaaggccagcgaccacatcaacaactggctggcctggtatcagcagaagcctggacaggcccctaagctgctgatctacggcgctaccacactggaaacaggcgtgcccagcagattttctggcagcggctctggcaccgactacaccctgacaatatccagcctccagcctgaggacttcgccacctactactgtcagcagagctggaacaccccttggacattcggccagggcaccaagctggaaatcaagagactcgaggacctgaagaacgtgttcccacctgaggtggccgtgttcgagcctagcgaggccgagatcagccacacccagaaagccaccctcgtgtgcctggctaccggcttctaccccgaccatgtggaactgtcttggtgggtcaacggcaaagaggtgcacagcggcgtgtgtaccgacccccagccactgaaagaacagcccgccctgaacgacagccggtactgcctgagcagcagactgagagtgtccgccaccttctggcagaacccccggaaccacttcagatgccaggtgcagttctacggcctgagcgagaacgacgagtggacccaggacagagccaagcccgtgacccagatcgtgtctgccgaagcctggggcagagccgattgcggctttaccagcgagagctaccagcagggcgtgctgagcgccaccatcctgtacgagatcctgctgggcaaggccaccctgtacgccgtgctggtgtctgccctggtgctgatggctatggtcaagcggaaggacagccggggaagggccaagcgatctggatctggagcaacaaacttctcactactcaaacaagcaggtgacgtggaggagaatcccgggcctactagtgccaccatggactggatttggcgcatccttttccttgtcggcgctgctaccggcgcccattccttcgaacaagttcagcttcaacagcctggcgctgagctggtcaaacctggcgcttctgtgaagatgagctgcaaagccagcggctacgccttcagcagctactggatcaactggatgaagcagaaacccggccagggactcgaatggatcggccaaatctatcccggcgacggcgacaccaactacaacggcaagttcaagggcagagccacactgaccgccgatacctctagcagcacagcctacatgcagctgagcagcctgaccagcgaagatagcgccgtgtacttctgtgcccggtccatcacaacagtcgtgggctgcgctatggactattggggccagggaacaagcgtgaccgtgtctagtacgcgtatccagaaccctgatcctgccgtgtaccagctgcgggatagcaagagcagcgacaagagcgtgtgtctgttcaccgacttcgacagccagaccaacgtgtcccagagcaaggactccgacgtgtacatcaccgataagtgcgtgctggacatgcggagcatggacttcaagagcaactccgccgtggcctggtccaacaagtccgatttcgcctgcgccaacgccttcaacaacagcattatccccgaggacacattcttcccaagccccgagagcagctgcgacgtgaagctggtggaaaagagcttcgagacagacaccaacctgaacttccagaacctgagcgtgatcggcttcagaatcctgctgctgaaagtggccggctttaacctgctgatgaccctgcggctgtggtccagctaa

SEQ ID NO: 8095 - DNA, 1986 bp, synthetic construct
  source 1..1986: mol_type = other DNA
atggccttaccagtgaccgccttgctcctgccgctggccttgctgctccacgccgccaggccggcatgcgcccgcagcgaggaccgctaccgcaaccccaagggcagcgcctgcagcggtaccggcggaggcggatctggcggcggaggtagcggtggcggaggatctgaattcgacatccagatgacacagagccctagcagcctgtctgccagcgtgggagacagagtgaccatcacatgcaaggccagcgaccacatcaacaactggctggcctggtatcagcagaagcctggacaggcccctaagctgctgatctacggcgctaccacactggaaacaggcgtgcccagcagattttctggcagcggctctggcaccgactacaccctgacaatatccagcctccagcctgaggacttcgccacctactactgtcagcagagctggaacaccccttggacattcggccagggcaccaagctggaaatcaagagactcgaggacctgaagaacgtgttcccacctgaggtggccgtgttcgagcctagcgaggccgagatcagccacacccagaaagccaccctcgtgtgcctggctaccggcttctaccccgaccatgtggaactgtcttggtgggtcaacggcaaagaggtgcacagcggcgtgtgtaccgacccccagccactgaaagaacagcccgccctgaacgacagccggtactgcctgagcagcagactgagagtgtccgccaccttctggcagaacccccggaaccacttcagatgccaggtgcagttctacggcctgagcgagaacgacgagtggacccaggacagagccaagcccgtgacccagatcgtgtctgccgaagcctggggcagagccgattgcggctttaccagcgagagctaccagcagggcgtgctgagcgccaccatcctgtacgagatcctgctgggcaaggccaccctgtacgccgtgctggtgtctgccctggtgctgatggctatggtcaagcggaaggacagccggggaagggccaagcgatctggatctggagcaacaaacttctcactactcaaacaagcaggtgacgtggaggagaatcccgggcctactagtgccaccatggactggatttggcgcatccttttccttgtcggcgctgctaccggcgcccattccttcgaacaagttcagcttcaacagcctggcgctgagctggtcaaacctggcgcttctgtgaagatgagctgcaaagccagcggctacgccttcagcagctactggatcaactggatgaagcagaaacccggccagggactcgaatggatcggccaaatctatcccggcgacggcgacaccaactacaacggcaagttcaagggcagagccacactgaccgccgatacctctagcagcacagcctacatgcagctgagcagcctgaccagcgaagatagcgccgtgtacttctgtgcccggtccatcacaacagtcgtgggctgcgctatggactattggggccagggaacaagcgtgaccgtgtctagtacgcgtatccagaaccctgatcctgccgtgtaccagctgcgggatagcaagagcagcgacaagagcgtgtgtctgttcaccgacttcgacagccagaccaacgtgtcccagagcaaggactccgacgtgtacatcaccgataagtgcgtgctggacatgcggagcatggacttcaagagcaactccgccgtggcctggtccaacaagtccgatttcgcctgcgccaacgccttcaacaacagcattatccccgaggacacattcttcccaagccccgagagcagctgcgacgtgaagctggtggaaaagagcttcgagacagacaccaacctgaacttccagaacctgagcgtgatcggcttcagaatcctgctgctgaaagtggccggctttaacctgctgatgaccctgcggctgtggtccagctaa

SEQ ID NO: 8096 - DNA, 1971 bp, synthetic construct; identical to SEQ ID NO: 8089
  source 1..1971: mol_type = other DNA

SEQ ID NO: 8097 - DNA, 1971 bp, synthetic construct
  source 1..1971: mol_type = other DNA
atggccttaccagtgaccgccttgctcctgccgctggccttgctgctccacgccgccaggccggcatgcgcccgcagcgacgaccgctaccgcaaccccaagggtaccggcggaggcggatctggcggcggaggtagcggtggcggaggatctgaattcgacatccagatgacacagagccctagcagcctgtctgccagcgtgggagacagagtgaccatcacatgcaaggccagcgaccacatcaacaactggctggcctggtatcagcagaagcctggacaggcccctaagctgctgatctacggcgctaccacactggaaacaggcgtgcccagcagattttctggcagcggctctggcaccgactacaccctgacaatatccagcctccagcctgaggacttcgccacctactactgtcagcagagctggaacaccccttggacattcggccagggcaccaagctggaaatcaagagactcgaggacctgaagaacgtgttcccacctgaggtggccgtgttcgagcctagcgaggccgagatcagccacacccagaaagccaccctcgtgtgcctggctaccggcttctaccccgaccatgtggaactgtcttggtgggtcaacggcaaagaggtgcacagcggcgtgtgtaccgacccccagccactgaaagaacagcccgccctgaacgacagccggtactgcctgagcagcagactgagagtgtccgccaccttctggcagaacccccggaaccacttcagatgccaggtgcagttctacggcctgagcgagaacgacgagtggacccaggacagagccaagcccgtgacccagatcgtgtctgccgaagcctggggcagagccgattgcggctttaccagcgagagctaccagcagggcgtgctgagcgccaccatcctgtacgagatcctgctgggcaaggccaccctgtacgccgtgctggtgtctgccctggtgctgatggctatggtcaagcggaaggacagccggggaagggccaagcgatctggatctggagcaacaaacttctcactactcaaacaagcaggtgacgtggaggagaatcccgggcctactagtgccaccatggactggatttggcgcatccttttccttgtcggcgctgctaccggcgcccattccttcgaacaagttcagcttcaacagcctggcgctgagctggtcaaacctggcgcttctgtgaagatgagctgcaaagccagcggctacgccttcagcagctactggatcaactggatgaagcagaaacccggccagggactcgaatggatcggccaaatctatcccggcgacggcgacaccaactacaacggcaagttcaagggcagagccacactgaccgccgatacctctagcagcacagcctacatgcagctgagcagcctgaccagcgaagatagcgccgtgtacttctgtgcccggtccatcacaacagtcgtgggctgcgctatggactattggggccagggaacaagcgtgaccgtgtctagtacgcgtatccagaaccctgatcctgccgtgtaccagctgcgggatagcaagagcagcgacaagagcgtgtgtctgttcaccgacttcgacagccagaccaacgtgtcccagagcaaggactccgacgtgtacatcaccgataagtgcgtgctggacatgcggagcatggacttcaagagcaactccgccgtggcctggtccaacaagtccgatttcgcctgcgccaacgccttcaacaacagcattatccccgaggacacattcttcccaagccccgagagcagctgcgacgtgaagctggtggaaaagagcttcgagacagacaccaacctgaacttccagaacctgagcgtgatcggcttcagaatcctgctgctgaaagtggccggctttaacctgctgatgaccctgcggctgtggtccagctaa

SEQ ID NO: 8098 - DNA, 1971 bp, synthetic construct
  source 1..1971: mol_type = other DNA
atggccttaccagtgaccgccttgctcctgccgctggccttgctgctccacgccgccaggccggcatgcgcccgcagcgacgagcgctaccgcaaccccaagggtaccggcggaggcggatctggcggcggaggtagcggtggcggaggatctgaattcgacatccagatgacacagagccctagcagcctgtctgccagcgtgggagacagagtgaccatcacatgcaaggccagcgaccacatcaacaactggctggcctggtatcagcagaagcctggacaggcccctaagctgctgatctacggcgctaccacactggaaacaggcgtgcccagcagattttctggcagcggctctggcaccgactacaccctgacaatatccagcctccagcctgaggacttcgccacctactactgtcagcagagctggaacaccccttggacattcggccagggcaccaagctggaaatcaagagactcgaggacctgaagaacgtgttcccacctgaggtggccgtgttcgagcctagcgaggccgagatcagccacacccagaaagccaccctcgtgtgcctggctaccggcttctaccccgaccatgtggaactgtcttggtgggtcaacggcaaagaggtgcacagcggcgtgtgtaccgacccccagccactgaaagaacagcccgccctgaacgacagccggtactgcctgagcagcagactgagagtgtccgccaccttctggcagaacccccggaaccacttcagatgccaggtgcagttctacggcctgagcgagaacgacgagtggacccaggacagagccaagcccgtgacccagatcgtgtctgccgaagcctggggcagagccgattgcggctttaccagcgagagctaccagcagggcgtgctgagcgccaccatcctgtacgagatcctgctgggcaaggccaccctgtacgccgtgctggtgtctgccctggtgctgatggctatggtcaagcggaaggacagccggggaagggccaagcgatctggatctggagcaacaaacttctcactactcaaacaagcaggtgacgtggaggagaatcccgggcctactagtgccaccatggactggatttggcgcatccttttccttgtcggcgctgctaccggcgcccattccttcgaacaagttcagcttcaacagcctggcgctgagctggtcaaacctggcgcttctgtgaagatgagctgcaaagccagcggctacgccttcagcagctactggatcaactggatgaagcagaaacccggccagggactcgaatggatcggccaaatctatcccggcgacggcgacaccaactacaacggcaagttcaagggcagagccacactgaccgccgatacctctagcagcacagcctacatgcagctgagcagcctgaccagcgaagatagcgccgtgtacttctgtgcccggtccatcacaacagtcgtgggctgcgctatggactattggggccagggaacaagcgtgaccgtgtctagtacgcgtatccagaaccctgatcctgccgtgtaccagctgcgggatagcaagagcagcgacaagagcgtgtgtctgttcaccgacttcgacagccagaccaacgtgtcccagagcaaggactccgacgtgtacatcaccgataagtgcgtgctggacatgcggagcatggacttcaagagcaactccgccgtggcctggtccaacaagtccgatttcgcctgcgccaacgccttcaacaacagcattatccccgaggacacattcttcccaagccccgagagcagctgcgacgtgaagctggtggaaaagagcttcgagacagacaccaacctgaacttccagaacctgagcgtgatcggcttcagaatcctgctgctgaaagtggccggctttaacctgctgatgaccctgcggctgtggtccagctaa

SEQ ID NO: 8099 - DNA, 1971 bp, synthetic construct
  source 1..1971: mol_type = other DNA
atggccttaccagtgaccgccttgctcctgccgctggccttgctgctccacgccgccaggccggcatgcgcccgcgccgaggaccgctaccgcaaccccaagggtaccggcggaggcggatctggcggcggaggtagcggtggcggaggatctgaattcgacatccagatgacacagagccctagcagcctgtctgccagcgtgggagacagagtgaccatcacatgcaaggccagcgaccacatcaacaactggctggcctggtatcagcagaagcctggacaggcccctaagctgctgatctacggcgctaccacactggaaacaggcgtgcccagcagattttctggcagcggctctggcaccgactacaccctgacaatatccagcctccagcctgaggacttcgccacctactactgtcagcagagctggaacaccccttggacattcggccagggcaccaagctggaaatcaagagactcgaggacctgaagaacgtgttcccacctgaggtggccgtgttcgagcctagcgaggccgagatcagccacacccagaaagccaccctcgtgtgcctggctaccggcttctaccccgaccatgtggaactgtcttggtgggtcaacggcaaagaggtgcacagcggcgtgtgtaccgacccccagccactgaaagaacagcccgccctgaacgacagccggtactgcctgagcagcagactgagagtgtccgccaccttctggcagaacccccggaaccacttcagatgccaggtgcagttctacggcctgagcgagaacgacgagtggacccaggacagagccaagcccgtgacccagatcgtgtctgccgaagcctggggcagagccgattgcggctttaccagcgagagctaccagcagggcgtgctgagcgccaccatcctgtacgagatcctgctgggcaaggccaccctgtacgccgtgctggtgtctgccctggtgctgatggctatggtcaagcggaaggacagccggggaagggccaagcgatctggatctggagcaacaaacttctcactactcaaacaagcaggtgacgtggaggagaatcccgggcctactagtgccaccatggactggatttggcgcatccttttccttgtcggcgctgctaccggcgcccattccttcgaacaagttcagcttcaacagcctggcgctgagctggtcaaacctggcgcttctgtgaagatgagctgcaaagccagcggctacgccttcagcagctactggatcaactggatgaagcagaaacccggccagggactcgaatggatcggccaaatctatcccggcgacggcgacaccaactacaacggcaagttcaagggcagagccacactgaccgccgatacctctagcagcacagcctacatgcagctgagcagcctgaccagcgaagatagcgccgtgtacttctgtgcccggtccatcacaacagtcgtgggctgcgctatggactattggggccagggaacaagcgtgaccgtgtctagtacgcgtatccagaaccctgatcctgccgtgtaccagctgcgggatagcaagagcagcgacaagagcgtgtgtctgttcaccgacttcgacagccagaccaacgtgtcccagagcaaggactccgacgtgtacatcaccgataagtgcgtgctggacatgcggagcatggacttcaagagcaactccgccgtggcctggtccaacaagtccgatttcgcctgcgccaacgccttcaacaacagcattatccccgaggacacattcttcccaagccccgagagcagctgcgacgtgaagctggtggaaaagagcttcgagacagacaccaacctgaacttccagaacctgagcgtgatcggcttcagaatcctgctgctgaaagtggccggctttaacctgctgatgaccctgcggctgtggtccagctaa

SEQ ID NO: 8100 - DNA, 1971 bp, synthetic construct
  source 1..1971: mol_type = other DNA
atggccttaccagtgaccgccttgctcctgccgctggccttgctgctccacgccgccaggccggcatgcgcccgcaacgaggaccgctaccgcaaccccaagggtaccggcggaggcggatctggcggcggaggtagcggtggcggaggatctgaattcgacatccagatgacacagagccctagcagcctgtctgccagcgtgggagacagagtgaccatcacatgcaaggccagcgaccacatcaacaactggctggcctggtatcagcagaagcctggacaggcccctaagctgctgatctacggcgctaccacactggaaacaggcgtgcccagcagattttctggcagcggctctggcaccgactacaccctgacaatatccagcctccagcctgaggacttcgccacctactactgtcagcagagctggaacaccccttggacattcggccagggcaccaagctggaaatcaagagactcgaggacctgaagaacgtgttcccacctgaggtggccgtgttcgagcctagcgaggccgagatcagccacacccagaaagccaccctcgtgtgcctggctaccggcttctaccccgaccatgtggaactgtcttggtgggtcaacggcaaagaggtgcacagcggcgtgtgtaccgacccccagccactgaaagaacagcccgccctgaacgacagccggtactgcctgagcagcagactgagagtgtccgccaccttctggcagaacccccggaaccacttcagatgccaggtgcagttctacggcctgagcgagaacgacgagtggacccaggacagagccaagcccgtgacccagatcgtgtctgccgaagcctggggcagagccgattgcggctttaccagcgagagctaccagcagggcgtgctgagcgccaccatcctgtacgagatcctgctgggcaaggccaccctgtacgccgtgctggtgtctgccctggtgctgatggctatggtcaagcggaaggacagccggggaagggccaagcgatctggatctggagcaacaaacttctcactactcaaacaagcaggtgacgtggaggagaatcccgggcctactagtgccaccatggactggatttggcgcatccttttccttgtcggcgctgctaccggcgcccattccttcgaacaagttcagcttcaacagcctggcgctgagctggtcaaacctggcgcttctgtgaagatgagctgcaaagccagcggctacgccttcagcagctactggatcaactggatgaagcagaaacccggccagggactcgaatggatcggccaaatctatcccggcgacggcgacaccaactacaacggcaagttcaagggcagagccacactgaccgccgatacctctagcagcacagcctacatgcagctgagcagcctgaccagcgaagatagcgccgtgtacttctgtgcccggtccatcacaacagtcgtgggctgcgctatggactattggggccagggaacaagcgtgaccgtgtctagtacgcgtatccagaaccctgatcctgccgtgtaccagctgcgggatagcaagagcagcgacaagagcgtgtgtctgttcaccgacttcgacagccagaccaacgtgtcccagagcaaggactccgacgtgtacatcaccgataagtgcgtgctggacatgcggagcatggacttcaagagcaactccgccgtggcctggtccaacaagtccgatttcgcctgcgccaacgccttcaacaacagcattatccccgaggacacattcttcccaagccccgagagcagctgcgacgtgaagctggtggaaaagagcttcgagacagacaccaacctgaacttccagaacctgagcgtgatcggcttcagaatcctgctgctgaaagtggccggctttaacctgctgatgaccctgcggctgtggtccagctaa

SEQ ID NO: 8101 - DNA, 1971 bp, synthetic construct
  source 1..1971: mol_type = other DNA
atggccttaccagtgaccgccttgctcctgccgctggccttgctgctccacgccgccaggccggcatgcgcccgcaacgaggaccgctaccgcagccccaagggtaccggcggaggcggatctggcggcggaggtagcggtggcggaggatctgaattcgacatccagatgacacagagccctagcagcctgtctgccagcgtgggagacagagtgaccatcacatgcaaggccagcgaccacatcaacaactggctggcctggtatcagcagaagcctggacaggcccctaagctgctgatctacggcgctaccacactggaaacaggcgtgcccagcagattttctggcagcggctctggcaccgactacaccctgacaatatccagcctccagcctgaggacttcgccacctactactgtcagcagagctggaacaccccttggacattcggccagggcaccaagctggaaatcaagagactcgaggacctgaagaacgtgttcccacctgaggtggccgtgttcgagcctagcgaggccgagatcagccacacccagaaagccaccctcgtgtgcctggctaccggcttctaccccgaccatgtggaactgtcttggtgggtcaacggcaaagaggtgcacagcggcgtgtgtaccgacccccagccactgaaagaacagcccgccctgaacgacagccggtactgcctgagcagcagactgagagtgtccgccaccttctggcagaacccccggaaccacttcagatgccaggtgcagttctacggcctgagcgagaacgacgagtggacccaggacagagccaagcccgtgacccagatcgtgtctgccgaagcctggggcagagccgattgcggctttaccagcgagagctaccagcagggcgtgctgagcgccaccatcctgtacgagatcctgctgggcaaggccaccctgtacgccgtgctggtgtctgccctggtgctgatggctatggtcaagcggaaggacagccggggaagggccaagcgatctggatctggagcaacaaacttctcactactcaaacaagcaggtgacgtggaggagaatcccgggcctactagtgccaccatggactggatttggcgcatccttttccttgtcggcgctgctaccggcgcccattccttcgaacaagttcagcttcaacagcctggcgctgagctggtcaaacctggcgcttctgtgaagatgagctgcaaagccagcggctacgccttcagcagctactggatcaactggatgaagcagaaacccggccagggactcgaatggatcggccaaatctatcccggcgacggcgacaccaactacaacggcaagttcaagggcagagccacactgaccgccgatacctctagcagcacagcctacatgcagctgagcagcctgaccagcgaagatagcgccgtgtacttctgtgcccggtccatcacaacagtcgtgggctgcgctatggactattggggccagggaacaagcgtgaccgtgtctagtacgcgtatccagaaccctgatcctgccgtgtaccagctgcgggatagcaagagcagcgacaagagcgtgtgtctgttcaccgacttcgacagccagaccaacgtgtcccagagcaaggactccgacgtgtacatcaccgataagtgcgtgctggacatgcggagcatggacttcaagagcaactccgccgtggcctggtccaacaagtccgatttcgcctgcgccaacgccttcaacaacagcattatccccgaggacacattcttcccaagccccgagagcagctgcgacgtgaagctggtggaaaagagcttcgagacagacaccaacctgaacttccagaacctgagcgtgatcggcttcagaatcctgctgctgaaagtggccggctttaacctgctgatgaccctgcggctgtggtccagctaa

SEQ ID NO: 8102 - DNA, 1962 bp, synthetic construct; identical to SEQ ID NO: 8086
  source 1..1962: mol_type = other DNA

SEQ ID NO: 8103 - DNA, 1962 bp, synthetic construct
  source 1..1962: mol_type = other DNA
atggccttaccagtgaccgccttgctcctgccgctggccttgctgctccacgccgccaggccggcatgcgcccgcagcgaggaccgctacaagggtaccggcggaggcggatctggcggcggaggtagcggtggcggaggatctgaattcgacatccagatgacacagagccctagcagcctgtctgccagcgtgggagacagagtgaccatcacatgcaaggccagcgaccacatcaacaactggctggcctggtatcagcagaagcctggacaggcccctaagctgctgatctacggcgctaccacactggaaacaggcgtgcccagcagattttctggcagcggctctggcaccgactacaccctgacaatatccagcctccagcctgaggacttcgccacctactactgtcagcagagctggaacaccccttggacattcggccagggcaccaagctggaaatcaagagactcgaggacctgaagaacgtgttcccacctgaggtggccgtgttcgagcctagcgaggccgagatcagccacacccagaaagccaccctcgtgtgcctggctaccggcttctaccccgaccatgtggaactgtcttggtgggtcaacggcaaagaggtgcacagcggcgtgtgtaccgacccccagccactgaaagaacagcccgccctgaacgacagccggtactgcctgagcagcagactgagagtgtccgccaccttctggcagaacccccggaaccacttcagatgccaggtgcagttctacggcctgagcgagaacgacgagtggacccaggacagagccaagcccgtgacccagatcgtgtctgccgaagcctggggcagagccgattgcggctttaccagcgagagctaccagcagggcgtgctgagcgccaccatcctgtacgagatcctgctgggcaaggccaccctgtacgccgtgctggtgtctgccctggtgctgatggctatggtcaagcggaaggacagccggggaagggccaagcgatctggatctggagcaacaaacttctcactactcaaacaagcaggtgacgtggaggagaatcccgggcctactagtgccaccatggactggatttggcgcatccttttccttgtcggcgctgctaccggcgcccattccttcgaacaagttcagcttcaacagcctggcgctgagctggtcaaacctggcgcttctgtgaagatgagctgcaaagccagcggctacgccttcagcagctactggatcaactggatgaagcagaaacccggccagggactcgaatggatcggccaaatctatcccggcgacggcgacaccaactacaacggcaagttcaagggcagagccacactgaccgccgatacctctagcagcacagcctacatgcagctgagcagcctgaccagcgaagatagcgccgtgtacttctgtgcccggtccatcacaacagtcgtgggctgcgctatggactattggggccagggaacaagcgtgaccgtgtctagtacgcgtatccagaaccctgatcctgccgtgtaccagctgcgggatagcaagagcagcgacaagagcgtgtgtctgttcaccgacttcgacagccagaccaacgtgtcccagagcaaggactccgacgtgtacatcaccgataagtgcgtgctggacatgcggagcatggacttcaagagcaactccgccgtggcctggtccaacaagtccgatttcgcctgcgccaacgccttcaacaacagcattatccccgaggacacattcttcccaagccccgagagcagctgcgacgtgaagctggtggaaaagagcttcgagacagacaccaacctgaacttccagaacctgagcgtgatcggcttcagaatcctgctgctgaaagtggccggctttaacctgctgatgaccctgcggctgtggtccagctaa

SEQ ID NO: 8104 - DNA, 1962 bp, synthetic construct
  source 1..1962: mol_type = other DNA
atggccttaccagtgaccgccttgctcctgccgctggccttgctgctccacgccgccaggccggcatgcgcccgcagcgaggaccgctacagcggtaccggcggaggcggatctggcggcggaggtagcggtggcggaggatctgaattcgacatccagatgacacagagccctagcagcctgtctgccagcgtgggagacagagtgaccatcacatgcaaggccagcgaccacatcaacaactggctggcctggtatcagcagaagcctggacaggcccctaagctgctgatctacggcgctaccacactggaaacaggcgtgcccagcagattttctggcagcggctctggcaccgactacaccctgacaatatccagcctccagcctgaggacttcgccacctactactgtcagcagagctggaacaccccttggacattcggccagggcaccaagctggaaatcaagagactcgaggacctgaagaacgtgttcccacctgaggtggccgtgttcgagcctagcgaggccgagatcagccacacccagaaagccaccctcgtgtgcctggctaccggcttctaccccgaccatgtggaactgtcttggtgggtcaacggcaaagaggtgcacagcggcgtgtgtaccgacccccagccactgaaagaacagcccgccctgaacgacagccggtactgcctgagcagcagactgagagtgtccgccaccttctggcagaacccccggaaccacttcagatgccaggtgcagttctacggcctgagcgagaacgacgagtggacccaggacagagccaagcccgtgacccagatcgtgtctgccgaagcctggggcagagccgattgcggctttaccagcgagagctaccagcagggcgtgctgagcgccaccatcctgtacgagatcctgctgggcaaggccaccctgtacgccgtgctggtgtctgccctggtgctgatggctatggtcaagcggaaggacagccggggaagggccaagcgatctggatctggagcaacaaacttctcactactcaaacaagcaggtgacgtggaggagaatcccgggcctactagtgccaccatggactggatttggcgcatccttttccttgtcggcgctgctaccggcgcccattccttcgaacaagttcagcttcaacagcctggcgctgagctggtcaaacctggcgcttctgtgaagatgagctgcaaagccagcggctacgccttcagcagctactggatcaactggatgaagcagaaacccggccagggactcgaatggatcggccaaatctatcccggcgacggcgacaccaactacaacggcaagttcaagggcagagccacactgaccgccgatacctctagcagcacagcctacatgcagctgagcagcctgaccagcgaagatagcgccgtgtacttctgtgcccggtccatcacaacagtcgtgggctgcgctatggactattggggccagggaacaagcgtgaccgtgtctagtacgcgtatccagaaccctgatcctgccgtgtaccagctgcgggatagcaagagcagcgacaagagcgtgtgtctgttcaccgacttcgacagccagaccaacgtgtcccagagcaaggactccgacgtgtacatcaccgataagtgcgtgctggacatgcggagcatggacttcaagagcaactccgccgtggcctggtccaacaagtccgatttcgcctgcgccaacgccttcaacaacagcattatccccgaggacacattcttcccaagccccgagagcagctgcgacgtgaagctggtggaaaagagcttcgagacagacaccaacctgaacttccagaacctgagcgtgatcggcttcagaatcctgctgctgaaagtggccggctttaacctgctgatgaccctgcggctgtggtccagctaa

SEQ ID NO: 8105 - DNA, 1962 bp, synthetic construct
  source 1..1962: mol_type = other DNA
atggccttaccagtgaccgccttgctcctgccgctggccttgctgctccacgccgccaggccggcatgcgcccgcagcgaggaccgctacttcggtaccggcggaggcggatctggcggcggaggtagcggtggcggaggatctgaattcgacatccagatgacacagagccctagcagcctgtctgccagcgtgggagacagagtgaccatcacatgcaaggccagcgaccacatcaacaactggctggcctggtatcagcagaagcctggacaggcccctaagctgctgatctacggcgctaccacactggaaacaggcgtgcccagcagattttctggcagcggctctggcaccgactacaccctgacaatatccagcctccagcctgaggacttcgccacctactactgtcagcagagctggaacaccccttggacattcggccagggcaccaagctggaaatcaagagactcgaggacctgaagaacgtgttcccacctgaggtggccgtgttcgagcctagcgaggccgagatcagccacacccagaaagccaccctcgtgtgcctggctaccggcttctaccccgaccatgtggaactgtcttggtgggtcaacggcaaagaggtgcacagcggcgtgtgtaccgacccccagccactgaaagaacagcccgccctgaacgacagccggtactgcctgagcagcagactgagagtgtccgccaccttctggcagaacccccggaaccacttcagatgccaggtgcagttctacggcctgagcgagaacgacgagtggacccaggacagagccaagcccgtgacccagatcgtgtctgccgaagcctggggcagagccgattgcggctttaccagcgagagctaccagcagggcgtgctgagcgccaccatcctgtacgagatcctgctgggcaaggccaccctgtacgccgtgctggtgtctgccctggtgctgatggctatggtcaagcggaaggacagccggggaagggccaagcgatctggatctggagcaacaaacttctcactactcaaacaagcaggtgacgtggaggagaatcccgggcctactagtgccaccatggactggatttggcgcatccttttccttgtcggcgctgctaccggcgcccattccttcgaacaagttcagcttcaacagcctggcgctgagctggtcaaacctggcgcttctgtgaagatgagctgcaaagccagcggctacgccttcagcagctactggatcaactggatgaagcagaaacccggccagggactcgaatggatcggccaaatctatcccggcgacggcgacaccaactacaacggcaagttcaagggcagagccacactgaccgccgatacctctagcagcacagcctacatgcagctgagcagcctgaccagcgaagatagcgccgtgtacttctgtgcccggtccatcacaacagtcgtgggctgcgctatggactattggggccagggaacaagcgtgaccgtgtctagtacgcgtatccagaaccctgatcctgccgtgtaccagctgcgggatagcaagagcagcgacaagagcgtgtgtctgttcaccgacttcgacagccagaccaacgtgtcccagagcaaggactccgacgtgtacatcaccgataagtgcgtgctggacatgcggagcatggacttcaagagcaactccgccgtggcctggtccaacaagtccgatttcgcctgcgccaacgccttcaacaacagcattatccccgaggacacattcttcccaagccccgagagcagctgcgacgtgaagctggtggaaaagagcttcgagacagacaccaacctgaacttccagaacctgagcgtgatcggcttcagaatcctgctgctgaaagtggccggctttaacctgctgatgaccctgcggctgtggtccagctaa

SEQ ID NO: 8106 - DNA, 1962 bp, synthetic construct
  source 1..1962: mol_type = other DNA
atggccttaccagtgaccgccttgctcctgccgctggccttgctgctccacgccgccaggccggcatgcgcccgcagcgaggaccgctacatcggtaccggcggaggcggatctggcggcggaggtagcggtggcggaggatctgaattcgacatccagatgacacagagccctagcagcctgtctgccagcgtgggagacagagtgaccatcacatgcaaggccagcgaccacatcaacaactggctggcctggtatcagcagaagcctggacaggcccctaagctgctgatctacggcgctaccacactggaaacaggcgtgcccagcagattttctggcagcggctctggcaccgactacaccctgacaatatccagcctccagcctgaggacttcgccacctactactgtcagcagagctggaacaccccttggacattcggccagggcaccaagctggaaatcaagagactcgaggacctgaagaacgtgttcccacctgaggtggccgtgttcgagcctagcgaggccgagatcagccacacccagaaagccaccctcgtgtgcctggctaccggcttctaccccgaccatgtggaactgtcttggtgggtcaacggcaaagaggtgcacagcggcgtgtgtaccgacccccagccactgaaagaacagcccgccctgaacgacagccggtactgcctgagcagcagactgagagtgtccgccaccttctggcagaacccccggaaccacttcagatgccaggtgcagttctacggcctgagcgagaacgacgagtggacccaggacagagccaagcccgtgacccagatcgtgtctgccgaagcctggggcagagccgattgcggctttaccagcgagagctaccagcagggcgtgctgagcgccaccatcctgtacgagatcctgctgggcaaggccaccctgtacgccgtgctggtgtctgccctggtgctgatggctatggtcaagcggaaggacagccggggaagggccaagcgatctggatctggagcaacaaacttctcactactcaaacaagcaggtgacgtggaggagaatcccgggcctactagtgccaccatggactggatttggcgcatccttttccttgtcggcgctgctaccggcgcccattccttcgaacaagttcagcttcaacagcctggcgctgagctggtcaaacctggcgcttctgtgaagatgagctgcaaagccagcggctacgccttcagcagctactggatcaactggatgaagcagaaacccggccagggactcgaatggatcggccaaatctatcccggcgacggcgacaccaactacaacggcaagttcaagggcagagccacactgaccgccgatacctctagcagcacagcctacatgcagctgagcagcctgaccagcgaagatagcgccgtgtacttctgtgcccggtccatcacaacagtcgtgggctgcgctatggactattggggccagggaacaagcgtgaccgtgtctagtacgcgtatccagaaccctgatcctgccgtgtaccagctgcgggatagcaagagcagcgacaagagcgtgtgtctgttcaccgacttcgacagccagaccaacgtgtcccagagcaaggactccgacgtgtacatcaccgataagtgcgtgctggacatgcggagcatggacttcaagagcaactccgccgtggcctggtccaacaagtccgatttcgcctgcgccaacgccttcaacaacagcattatccccgaggacacattcttcccaagccccgagagcagctgcgacgtgaagctggtggaaaagagcttcgagacagacaccaacctgaacttccagaacctgagcgtgatcggcttcagaatcctgctgctgaaagtggccggctttaacctgctgatgaccctgcggctgtggtccagctaa

SEQ ID NO: 8107 - DNA, 1962 bp, synthetic construct
  source 1..1962: mol_type = other DNA
atggccttaccagtgaccgccttgctcctgccgctggccttgctgctccacgccgccaggccggcatgcgcccgcagcgaggaccgctacaacggtaccggcggaggcggatctggcggcggaggtagcggtggcggaggatctgaattcgacatccagatgacacagagccctagcagcctgtctgccagcgtgggagacagagtgaccatcacatgcaaggccagcgaccacatcaacaactggctggcctggtatcagcagaagcctggacaggcccctaagctgctgatctacggcgctaccacactggaaacaggcgtgcccagcagattttctggcagcggctctggcaccgactacaccctgacaatatccagcctccagcctgaggacttcgccacctactactgtcagcagagctggaacaccccttggacattcggccagggcaccaagctggaaatcaagagactcgaggacctgaagaacgtgttcccacctgaggtggccgtgttcgagcctagcgaggccgagatcagccacacccagaaagccaccctcgtgtgcctggctaccggcttctaccccgaccatgtggaactgtcttggtgggtcaacggcaaagaggtgcacagcggcgtgtgtaccgacccccagccactgaaagaacagcccgccctgaacgacagccggtactgcctgagcagcagactgagagtgtccgccaccttctggcagaacccccggaaccacttcagatgccaggtgcagttctacggcctgagcgagaacgacgagtggacccaggacagagccaagcccgtgacccagatcgtgtctgccgaagcctggggcagagccgattgcggctttaccagcgagagctaccagcagggcgtgctgagcgccaccatcctgtacgagatcctgctgggcaaggccaccctgtacgccgtgctggtgtctgccctggtgctgatggctatggtcaagcggaaggacagccggggaagggccaagcgatctggatctggagcaacaaacttctcactactcaaacaagcaggtgacgtggaggagaatcccgggcctactagtgccaccatggactggatttggcgcatccttttccttgtcggcgctgctaccggcgcccattccttcgaacaagttcagcttcaacagcctggcgctgagctggtcaaacctggcgcttctgtgaagatgagctgcaaagccagcggctacgccttcagcagctactggatcaactggatgaagcagaaacccggccagggactcgaatggatcggccaaatctatcccggcgacggcgacaccaactacaacggcaagttcaagggcagagccacactgaccgccgatacctctagcagcacagcctacatgcagctgagcagcctgaccagcgaagatagcgccgtgtacttctgtgcccggtccatcacaacagtcgtgggctgcgctatggactattggggccagggaacaagcgtgaccgtgtctagtacgcgtatccagaaccctgatcctgccgtgtaccagctgcgggatagcaagagcagcgacaagagcgtgtgtctgttcaccgacttcgacagccagaccaacgtgtcccagagcaaggactccgacgtgtacatcaccgataagtgcgtgctggacatgcggagcatggacttcaagagcaactccgccgtggcctggtccaacaagtccgatttcgcctgcgccaacgccttcaacaacagcattatccccgaggacacattcttcccaagccccgagagcagctgcgacgtgaagctggtggaaaagagcttcgagacagacaccaacctgaacttccagaacctgagcgtgatcggcttcagaatcctgctgctgaaagtggccggctttaacctgctgatgaccctgcggctgtggtccagctaa

SEQ ID NO: 8108 - DNA, 1962 bp, synthetic construct
  source 1..1962: mol_type = other DNA
atggccttaccagtgaccgccttgctcctgccgctggccttgctgctccacgccgccaggccggcatgcgcccgcagcgaggaccgctacaccggtaccggcggaggcggatctggcggcggaggtagcggtggcggaggatctgaattcgacatccagatgacacagagccctagcagcctgtctgccagcgtgggagacagagtgaccatcacatgcaaggccagcgaccacatcaacaactggctggcctggtatcagcagaagcctggacaggcccctaagctgctgatctacggcgctaccacactggaaacaggcgtgcccagcagattttctggcagcggctctggcaccgactacaccctgacaatatccagcctccagcctgaggacttcgccacctactactgtcagcagagctggaacaccccttggacattcggccagggcaccaagctggaaatcaagagactcgaggacctgaagaacgtgttcccacctgaggtggccgtgttcgagcctagcgaggccgagatcagccacacccagaaagccaccctcgtgtgcctggctaccggcttctaccccgaccatgtggaactgtcttggtgggtcaacggcaaagaggtgcacagcggcgtgtgtaccgacccccagccactgaaagaacagcccgccctgaacgacagccggtactgcctgagcagcagactgagagtgtccgccaccttctggcagaacccccggaaccacttcagatgccaggtgcagttctacggcctgagcgagaacgacgagtggacccaggacagagccaagcccgtgacccagatcgtgtctgccgaagcctggggcagagccgattgcggctttaccagcgagagctaccagcagggcgtgctgagcgccaccatcctgtacgagatcctgctgggcaaggccaccctgtacgccgtgctggtgtctgccctggtgctgatggctatggtcaagcggaaggacagccggggaagggccaagcgatctggatctggagcaacaaacttctcactactcaaacaagcaggtgacgtggaggagaatcccgggcctactagtgccaccatggactggatttggcgcatccttttccttgtcggcgctgctaccggcgcccattccttcgaacaagttcagcttcaacagcctggcgctgagctggtcaaacctggcgcttctgtgaagatgagctgcaaagccagcggctacgccttcagcagctactggatcaactggatgaagcagaaacccggccagggactcgaatggatcggccaaatctatcccggcgacggcgacaccaactacaacggcaagttcaagggcagagccacactgaccgccgatacctctagcagcacagcctacatgcagctgagcagcctgaccagcgaagatagcgccgtgtacttctgtgcccggtccatcacaacagtcgtgggctgcgctatggactattggggccagggaacaagcgtgaccgtgtctagtacgcgtatccagaaccctgatcctgccgtgtaccagctgcgggatagcaagagcagcgacaagagcgtgtgtctgttcaccgacttcgacagccagaccaacgtgtcccagagcaaggactccgacgtgtacatcaccgataagtgcgtgctggacatgcggagcatggacttcaagagcaactccgccgtggcctggtccaacaagtccgatttcgcctgcgccaacgccttcaacaacagcattatccccgaggacacattcttcccaagccccgagagcagctgcgacgtgaagctggtggaaaagagcttcgagacagacaccaacctgaacttccagaacctgagcgtgatcggcttcagaatcctgctgctgaaagtggccggctttaacctgctgatgaccctgcggctgtggtccagctaa

SEQ ID NO: 8109 - DNA, 1962 bp, synthetic construct
  source 1..1962: mol_type = other DNA
atggccttaccagtgaccgccttgctcctgccgctggccttgctgctccacgccgccaggccggcatgcgcccgcagcgaggaccgctacgccggtaccggcggaggcggatctggcggcggaggtagcggtggcggaggatctgaattcgacatccagatgacacagagccctagcagcctgtctgccagcgtgggagacagagtgaccatcacatgcaaggccagcgaccacatcaacaactggctggcctggtatcagcagaagcctggacaggcccctaagctgctgatctacggcgctaccacactggaaacaggcgtgcccagcagattttctggcagcggctctggcaccgactacaccctgacaatatccagcctccagcctgaggacttcgccacctactactgtcagcagagctggaacaccccttggacattcggccagggcaccaagctggaaatcaagagactcgaggacctgaagaacgtgttcccacctgaggtggccgtgttcgagcctagcgaggccgagatcagccacacccagaaagccaccctcgtgtgcctggctaccggcttctaccccgaccatgtggaactgtcttggtgggtcaacggcaaagaggtgcacagcggcgtgtgtaccgacccccagccactgaaagaacagcccgccctgaacgacagccggtactgcctgagcagcagactgagagtgtccgccaccttctggcagaacccccggaaccacttcagatgccaggtgcagttctacggcctgagcgagaacgacgagtggacccaggacagagccaagcccgtgacccagatcgtgtctgccgaagcctggggcagagccgattgcggctttaccagcgagagctaccagcagggcgtgctgagcgccaccatcctgtacgagatcctgctgggcaaggccaccctgtacgccgtgctggtgtctgccctggtgctgatggctatggtcaagcggaaggacagccggggaagggccaagcgatctggatctggagcaacaaacttctcactactcaaacaagcaggtgacgtggaggagaatcccgggcctactagtgccaccatggactggatttggcgcatccttttccttgtcggcgctgctaccggcgcccattccttcgaacaagttcagcttcaacagcctggcgctgagctggtcaaacctggcgcttctgtgaagatgagctgcaaagccagcggctacgccttcagcagctactggatcaactggatgaagcagaaacccggccagggactcgaatggatcggccaaatctatcccggcgacggcgacaccaactacaacggcaagttcaagggcagagccacactgaccgccgatacctctagcagcacagcctacatgcagctgagcagcctgaccagcgaagatagcgccgtgtacttctgtgcccggtccatcacaacagtcgtgggctgcgctatggactattggggccagggaacaagcgtgaccgtgtctagtacgcgtatccagaaccctgatcctgccgtgtaccagctgcgggatagcaagagcagcgacaagagcgtgtgtctgttcaccgacttcgacagccagaccaacgtgtcccagagcaaggactccgacgtgtacatcaccgataagtgcgtgctggacatgcggagcatggacttcaagagcaactccgccgtggcctggtccaacaagtccgatttcgcctgcgccaacgccttcaacaacagcattatccccgaggacacattcttcccaagccccgagagcagctgcgacgtgaagctggtggaaaagagcttcgagacagacaccaacctgaacttccagaacctgagcgtgatcggcttcagaatcctgctgctgaaagtggccggctttaacctgctgatgaccctgcggctgtggtccagctaa

SEQ ID NO: 8110 - DNA, 1962 bp, synthetic construct
  source 1..1962: mol_type = other DNA
atggccttaccagtgaccgccttgctcctgccgctggccttgctgctccacgccgccaggccggcatgcgcccgcagcgaggaccgctactacggtaccggcggaggcggatctggcggcggaggtagcggtggcggaggatctgaattcgacatccagatgacacagagccctagcagcctgtctgccagcgtgggagacagagtgaccatcacatgcaaggccagcgaccacatcaacaactggctggcctggtatcagcagaagcctggacaggcccctaagctgctgatctacggcgctaccacactggaaacaggcgtgcccagcagattttctggcagcggctctggcaccgactacaccctgacaatatccagcctccagcctgaggacttcgccacctactactgtcagcagagctggaacaccccttggacattcggccagggcaccaagctggaaatcaagagactcgaggacctgaagaacgtgttcccacctgaggtggccgtgttcgagcctagcgaggccgagatcagccacacccagaaagccaccctcgtgtgcctggctaccggcttctaccccgaccatgtggaactgtcttggtgggtcaacggcaaagaggtgcacagcggcgtgtgtaccgacccccagccactgaaagaacagcccgccctgaacgacagccggtactgcctgagcagcagactgagagtgtccgccaccttctggcagaacccccggaaccacttcagatgccaggtgcagttctacggcctgagcgagaacgacgagtggacccaggacagagccaagcccgtgacccagatcgtgtctgccgaagcctggggcagagccgattgcggctttaccagcgagagctaccagcagggcgtgctgagcgccaccatcctgtacgagatcctgctgggcaaggccaccctgtacgccgtgctggtgtctgccctggtgctgatggctatggtcaagcggaaggacagccggggaagggccaagcgatctggatctggagcaacaaacttctcactactcaaacaagcaggtgacgtggaggagaatcccgggcctactagtgccaccatggactggatttggcgcatccttttccttgtcggcgctgctaccggcgcccattccttcgaacaagttcagcttcaacagcctggcgctgagctggtcaaacctggcgcttctgtgaagatgagctgcaaagccagcggctacgccttcagcagctactggatcaactggatgaagcagaaacccggccagggactcgaatggatcggccaaatctatcccggcgacggcgacaccaactacaacggcaagttcaagggcagagccacactgaccgccgatacctctagcagcacagcctacatgcagctgagcagcctgaccagcgaagatagcgccgtgtacttctgtgcccggtccatcacaacagtcgtgggctgcgctatggactattggggccagggaacaagcgtgaccgtgtctagtacgcgtatccagaaccctgatcctgccgtgtaccagctgcgggatagcaagagcagcgacaagagcgtgtgtctgttcaccgacttcgacagccagaccaacgtgtcccagagcaaggactccgacgtgtacatcaccgataagtgcgtgctggacatgcggagcatggacttcaagagcaactccgccgtggcctggtccaacaagtccgatttcgcctgcgccaacgccttcaacaacagcattatccccgaggacacattcttcccaagccccgagagcagctgcgacgtgaagctggtggaaaagagcttcgagacagacaccaacctgaacttccagaacctgagcgtgatcggcttcagaatcctgctgctgaaagtggccggctttaacctgctgatgaccctgcggctgtggtccagctaa

SEQ ID NO: 8111 - DNA, 1962 bp, synthetic construct
  source 1..1962: mol_type = other DNA
atggccttaccagtgaccgccttgctcctgccgctggccttgctgctccacgccgccaggccggcatgcgcccgcagcgaggaccgctaccccggtaccggcggaggcggatctggcggcggaggtagcggtggcggaggatctgaattcgacatccagatgacacagagccctagcagcctgtctgccagcgtgggagacagagtgaccatcacatgcaaggccagcgaccacatcaacaactggctggcctggtatcagcagaagcctggacaggcccctaagctgctgatctacggcgctaccacactggaaacaggcgtgcccagcagattttctggcagcggctctggcaccgactacaccctgacaatatccagcctccagcctgaggacttcgccacctactactgtcagcagagctggaacaccccttggacattcggccagggcaccaagctggaaatcaagagactcgaggacctgaagaacgtgttcccacctgaggtggccgtgttcgagcctagcgaggccgagatcagccacacccagaaagccaccctcgtgtgcctggctaccggcttctaccccgaccatgtggaactgtcttggtgggtcaacggcaaagaggtgcacagcggcgtgtgtaccgacccccagccactgaaagaacagcccgccctgaacgacagccggtactgcctgagcagcagactgagagtgtccgccaccttctggcagaacccccggaaccacttcagatgccaggtgcagttctacggcctgagcgagaacgacgagtggacccaggacagagccaagcccgtgacccagatcgtgtctgccgaagcctggggcagagccgattgcggctttaccagcgagagctaccagcagggcgtgctgagcgccaccatcctgtacgagatcctgctgggcaaggccaccctgtacgccgtgctggtgtctgccctggtgctgatggctatggtcaagcggaaggacagccggggaagggccaagcgatctggatctggagcaacaaacttctcactactcaaacaagcaggtgacgtggaggagaatcccgggcctactagtgccaccatggactggatttggcgcatccttttccttgtcggcgctgctaccggcgcccattccttcgaacaagttcagcttcaacagcctggcgctgagctggtcaaacctggcgcttctgtgaagatgagctgcaaagccagcggctacgccttcagcagctactggatcaactggatgaagcagaaacccggccagggactcgaatggatcggccaaatctatcccggcgacggcgacaccaactacaacggcaagttcaagggcagagccacactgaccgccgatacctctagcagcacagcctacatgcagctgagcagcctgaccagcgaagatagcgccgtgtacttctgtgcccggtccatcacaacagtcgtgggctgcgctatggactattggggccagggaacaagcgtgaccgtgtctagtacgcgtatccagaaccctgatcctgccgtgtaccagctgcgggatagcaagagcagcgacaagagcgtgtgtctgttcaccgacttcgacagccagaccaacgtgtcccagagcaaggactccgacgtgtacatcaccgataagtgcgtgctggacatgcggagcatggacttcaagagcaactccgccgtggcctggtccaacaagtccgatttcgcctgcgccaacgccttcaacaacagcattatccccgaggacacattcttcccaagccccgagagcagctgcgacgtgaagctggtggaaaagagcttcgagacagacaccaacctgaacttccagaacctgagcgtgatcggcttcagaatcctgctgctgaaagtggccggctttaacctgctgatgaccctgcggctgtggtccagctaa

SEQ ID NO: 8112 - DNA, 1962 bp, synthetic construct
  source 1..1962: mol_type = other DNA
atggccttaccagtgaccgccttgctcctgccgctggccttgctgctccacgccgccaggccggcatgcgcccgcagcgaggaccgctacgacggtaccggcggaggcggatctggcggcggaggtagcggtggcggaggatctgaattcgacatccagatgacacagagccctagcagcctgtctgccagcgtgggagacagagtgaccatcacatgcaaggccagcgaccacatcaacaactggctggcctggtatcagcagaagcctggacaggcccctaagctgctgatctacggcgctaccacactggaaacaggcgtgcccagcagattttctggcagcggctctggcaccgactacaccctgacaatatccagcctccagcctgaggacttcgccacctactactgtcagcagagctggaacaccccttggacattcggccagggcaccaagctggaaatcaagagactcgaggacctgaagaacgtgttcccacctgaggtggccgtgttcgagcctagcgaggccgagatcagccacacccagaaagccaccctcgtgtgcctggctaccggcttctaccccgaccatgtggaactgtcttggtgggtcaacggcaaagaggtgcacagcggcgtgtgtaccgacccccagccactgaaagaacagcccgccctgaacgacagccggtactgcctgagcagcagactgagagtgtccgccaccttctggcagaacccccggaaccacttcagatgccaggtgcagttctacggcctgagcgagaacgacgagtggacccaggacagagccaagcccgtgacccagatcgtgtctgccgaagcctggggcagagccgattgcggctttaccagcgagagctaccagcagggcgtgctgagcgccaccatcctgtacgagatcctgctgggcaaggccaccctgtacgccgtgctggtgtctgccctggtgctgatggctatggtcaagcggaaggacagccggggaagggccaagcgatctggatctggagcaacaaacttctcactactcaaacaagcaggtgacgtggaggagaatcccgggcctactagtgccaccatggactggatttggcgcatccttttccttgtcggcgctgctaccggcgcccattccttcgaacaagttcagcttcaacagcctggcgctgagctggtcaaacctggcgcttctgtgaagatgagctgcaaagccagcggctacgccttcagcagctactggatcaactggatgaagcagaaacccggccagggactcgaatggatcggccaaatctatcccggcgacggcgacaccaactacaacggcaagttcaagggcagagccacactgaccgccgatacctctagcagcacagcctacatgcagctgagcagcctgaccagcgaagatagcgccgtgtacttctgtgcccggtccatcacaacagtcgtgggctgcgctatggactattggggccagggaacaagcgtgaccgtgtctagtacgcgtatccagaaccctgatcctgccgtgtaccagctgcgggatagcaagagcagcgacaagagcgtgtgtctgttcaccgacttcgacagccagaccaacgtgtcccagagcaaggactccgacgtgtacatcaccgataagtgcgtgctggacatgcggagcatggacttcaagagcaactccgccgtggcctggtccaacaagtccgatttcgcctgcgccaacgccttcaacaacagcattatccccgaggacacattcttcccaagccccgagagcagctgcgacgtgaagctggtggaaaagagcttcgagacagacaccaacctgaacttccagaacctgagcgtgatcggcttcagaatcctgctgctgaaagtggccggctttaacctgctgatgaccctgcggctgtggtccagctaa

SEQ ID NO: 8113 - DNA, 1962 bp, synthetic construct
  source 1..1962: mol_type = other DNA
atggccttaccagtgaccgccttgctcctgccgctggccttgctgctccacgccgccaggccggcatgcgcccgcagcgaggaccactaccgcggtaccggcggaggcggatctggcggcggaggtagcggtggcggaggatctgaattcgacatccagatgacacagagccctagcagcctgtctgccagcgtgggagacagagtgaccatcacatgcaaggccagcgaccacatcaacaactggctggcctggtatcagcagaagcctggacaggcccctaagctgctgatctacggcgctaccacactggaaacaggcgtgcccagcagattttctggcagcggctctggcaccgactacaccctgacaatatccagcctccagcctgaggacttcgccacctactactgtcagcagagctggaacaccccttggacattcggccagggcaccaagctggaaatcaagagactcgaggacctgaagaacgtgttcccacctgaggtggccgtgttcgagcctagcgaggccgagatcagccacacccagaaagccaccctcgtgtgcctggctaccggcttctaccccgaccatgtggaactgtcttggtgggtcaacggcaaagaggtgcacagcggcgtgtgtaccgacccccagccactgaaagaacagcccgccctgaacgacagccggtactgcctgagcagcagactgagagtgtccgccaccttctggcagaacccccggaaccacttcagatgccaggtgcagttctacggcctgagcgagaacgacgagtggacccaggacagagccaagcccgtgacccagatcgtgtctgccgaagcctggggcagagccgattgcggctttaccagcgagagctaccagcagggcgtgctgagcgccaccatcctgtacgagatcctgctgggcaaggccaccctgtacgccgtgctggtgtctgccctggtgctgatggctatggtcaagcggaaggacagccggggaagggccaagcgatctggatctggagcaacaaacttctcactactcaaacaagcaggtgacgtggaggagaatcccgggcctactagtgccaccatggactggatttggcgcatccttttccttgtcggcgctgctaccggcgcccattccttcgaacaagttcagcttcaacagcctggcgctgagctggtcaaacctggcgcttctgtgaagatgagctgcaaagccagcggctacgccttcagcagctactggatcaactggatgaagcagaaacccggccagggactcgaatggatcggccaaatctatcccggcgacggcgacaccaactacaacggcaagttcaagggcagagccacactgaccgccgatacctctagcagcacagcctacatgcagctgagcagcctgaccagcgaagatagcgccgtgtacttctgtgcccggtccatcacaacagtcgtgggctgcgctatggactattggggccagggaacaagcgtgaccgtgtctagtacgcgtatccagaaccctgatcctgccgtgtaccagctgcgggatagcaagagcagcgacaagagcgtgtgtctgttcaccgacttcgacagccagaccaacgtgtcccagagcaaggactccgacgtgtacatcaccgataagtgcgtgctggacatgcggagcatggacttcaagagcaactccgccgtggcctggtccaacaagtccgatttcgcctgcgccaacgccttcaacaacagcattatccccgaggacacattcttcccaagccccgagagcagctgcgacgtgaagctggtggaaaagagcttcgagacagacaccaacctgaacttccagaacctgagcgtgatcggcttcagaatcctgctgctgaaagtggccggctttaacctgctgatgaccctgcggctgtggtccagctaa

SEQ ID NO: 8114 - DNA, 1962 bp, synthetic construct
  source 1..1962: mol_type = other DNA
atggccttaccagtgaccgccttgctcctgccgctggccttgctgctccacgccgccaggccggcatgcgcccgcagcgagagccgctaccgcggtaccggcggaggcggatctggcggcggaggtagcggtggcggaggatctgaattcgacatccagatgacacagagccctagcagcctgtctgccagcgtgggagacagagtgaccatcacatgcaaggccagcgaccacatcaacaactggctggcctggtatcagcagaagcctggacaggcccctaagctgctgatctacggcgctaccacactggaaacaggcgtgcccagcagattttctggcagcggctctggcaccgactacaccctgacaatatccagcctccagcctgaggacttcgccacctactactgtcagcagagctggaacaccccttggacattcggccagggcaccaagctggaaatcaagagactcgaggacctgaagaacgtgttcccacctgaggtggccgtgttcgagcctagcgaggccgagatcagccacacccagaaagccaccctcgtgtgcctggctaccggcttctaccccgaccatgtggaactgtcttggtgggtcaacggcaaagaggtgcacagcggcgtgtgtaccgacccccagccactgaaagaacagcccgccctgaacgacagccggtactgcctgagcagcagactgagagtgtccgccaccttctggcagaacccccggaaccacttcagatgccaggtgcagttctacggcctgagcgagaacgacgagtggacccaggacagagccaagcccgtgacccagatcgtgtctgccgaagcctggggcagagccgattgcggctttaccagcgagagctaccagcagggcgtgctgagcgccaccatcctgtacgagatcctgctgggcaaggccaccctgtacgccgtgctggtgtctgccctggtgctgatggctatggtcaagcggaaggacagccggggaagggccaagcgatctggatctggagcaacaaacttctcactactcaaacaagcaggtgacgtggaggagaatcccgggcctactagtgccaccatggactggatttggcgcatccttttccttgtcggcgctgctaccggcgcccattccttcgaacaagttcagcttcaacagcctggcgctgagctggtcaaacctggcgcttctgtgaagatgagctgcaaagccagcggctacgccttcagcagctactggatcaactggatgaagcagaaacccggccagggactcgaatggatcggccaaatctatcccggcgacggcgacaccaactacaacggcaagttcaagggcagagccacactgaccgccgatacctctagcagcacagcctacatgcagctgagcagcctgaccagcgaagatagcgccgtgtacttctgtgcccggtccatcacaacagtcgtgggctgcgctatggactattggggccagggaacaagcgtgaccgtgtctagtacgcgtatccagaaccctgatcctgccgtgtaccagctgcgggatagcaagagcagcgacaagagcgtgtgtctgttcaccgacttcgacagccagaccaacgtgtcccagagcaaggactccgacgtgtacatcaccgataagtgcgtgctggacatgcggagcatggacttcaagagcaactccgccgtggcctggtccaacaagtccgatttcgcctgcgccaacgccttcaacaacagcattatccccgaggacacattcttcccaagccccgagagcagctgcgacgtgaagctggtggaaaagagcttcgagacagacaccaacctgaacttccagaacctgagcgtgatcggcttcagaatcctgctgctgaaagtggccggctttaacctgctgatgaccctgcggctgtggtccagctaa

SEQ ID NO: 8115 - DNA, 1962 bp, synthetic construct
  source 1..1962: mol_type = other DNA
atggccttaccagtgaccgccttgctcctgccgctggccttgctgctccacgccgccaggccggcatgcgcccgcagcgagaaccgctaccgcggtaccggcggaggcggatctggcggcggaggtagcggtggcggaggatctgaattcgacatccagatgacacagagccctagcagcctgtctgccagcgtgggagacagagtgaccatcacatgcaaggccagcgaccacatcaacaactggctggcctggtatcagcagaagcctggacaggcccctaagctgctgatctacggcgctaccacactggaaacaggcgtgcccagcagattttctggcagcggctctggcaccgactacaccctgacaatatccagcctccagcctgaggacttcgccacctactactgtcagcagagctggaacaccccttggacattcggccagggcaccaagctggaaatcaagagactcgaggacctgaagaacgtgttcccacctgaggtggccgtgttcgagcctagcgaggccgagatcagccacacccagaaagccaccctcgtgtgcctggctaccggcttctaccccgaccatgtggaactgtcttggtgggtcaacggcaaagaggtgcacagcggcgtgtgtaccgacccccagccactgaaagaacagcccgccctgaacgacagccggtactgcctgagcagcagactgagagtgtccgccaccttctggcagaacccccggaaccacttcagatgccaggtgcagttctacggcctgagcgagaacgacgagtggacccaggacagagccaagcccgtgacccagatcgtgtctgccgaagcctggggcagagccgattgcggctttaccagcgagagctaccagcagggcgtgctgagcgccaccatcctgtacgagatcctgctgggcaaggccaccctgtacgccgtgctggtgtctgccctggtgctgatggctatggtcaagcggaaggacagccggggaagggccaagcgatctggatctggagcaacaaacttctcactactcaaacaagcaggtgacgtggaggagaatcccgggcctactagtgccaccatggactggatttggcgcatccttttccttgtcggcgctgctaccggcgcccattccttcgaacaagttcagcttcaacagcctggcgctgagctggtcaaacctggcgcttctgtgaagatgagctgcaaagccagcggctacgccttcagcagctactggatcaactggatgaagcagaaacccggccagggactcgaatggatcggccaaatctatcccggcgacggcgacaccaactacaacggcaagttcaagggcagagccacactgaccgccgatacctctagcagcacagcctacatgcagctgagcagcctgaccagcgaagatagcgccgtgtacttctgtgcccggtccatcacaacagtcgtgggctgcgctatggactattggggccagggaacaagcgtgaccgtgtctagtacgcgtatccagaaccctgatcctgccgtgtaccagctgcgggatagcaagagcagcgacaagagcgtgtgtctgttcaccgacttcgacagccagaccaacgtgtcccagagcaaggactccgacgtgtacatcaccgataagtgcgtgctggacatgcggagcatggacttcaagagcaactccgccgtggcctggtccaacaagtccgatttcgcctgcgccaacgccttcaacaacagcattatccccgaggacacattcttcccaagccccgagagcagctgcgacgtgaagctggtggaaaagagcttcgagacagacaccaacctgaacttccagaacctgagcgtgatcggcttcagaatcctgctgctgaaagtggccggctttaacctgctgatgaccctgcggctgtggtccagctaa

SEQ ID NO: 8116 - DNA, 1962 bp, synthetic construct
  source 1..1962: mol_type = other DNA
atggccttaccagtgaccgccttgctcctgccgctggccttgctgctccacgccgccaggccggcatgcgcccgcagcgagggccgctaccgcggtaccggcggaggcggatctggcggcggaggtagcggtggcggaggatctgaattcgacatccagatgacacagagccctagcagcctgtctgccagcgtgggagacagagtgaccatcacatgcaaggccagcgaccacatcaacaactggctggcctggtatcagcagaagcctggacaggcccctaagctgctgatctacggcgctaccacactggaaacaggcgtgcccagcagattttctggcagcggctctggcaccgactacaccctgacaatatccagcctccagcctgaggacttcgccacctactactgtcagcagagctggaacaccccttggacattcggccagggcaccaagctggaaatcaagagactcgaggacctgaagaacgtgttcccacctgaggtggccgtgttcgagcctagcgaggccgagatcagccacacccagaaagccaccctcgtgtgcctggctaccggcttctaccccgaccatgtggaactgtcttggtgggtcaacggcaaagaggtgcacagcggcgtgtgtaccgacccccagccactgaaagaacagcccgccctgaacgacagccggtactgcctgagcagcagactgagagtgtccgccaccttctggcagaacccccggaaccacttcagatgccaggtgcagttctacggcctgagcgagaacgacgagtggacccaggacagagccaagcccgtgacccagatcgtgtctgccgaagcctggggcagagccgattgcggctttaccagcgagagctaccagcagggcgtgctgagcgccaccatcctgtacgagatcctgctgggcaaggccaccctgtacgccgtgctggtgtctgccctggtgctgatggctatggtcaagcggaaggacagccggggaagggccaagcgatctggatctggagcaacaaacttctcactactcaaacaagcaggtgacgtggaggagaatcccgggcctactagtgccaccatggactggatttggcgcatccttttccttgtcggcgctgctaccggcgcccattccttcgaacaagttcagcttcaacagcctggcgctgagctggtcaaacctggcgcttctgtgaagatgagctgcaaagccagcggctacgccttcagcagctactggatcaactggatgaagcagaaacccggccagggactcgaatggatcggccaaatctatcccggcgacggcgacaccaactacaacggcaagttcaagggcagagccacactgaccgccgatacctctagcagcacagcctacatgcagctgagcagcctgaccagcgaagatagcgccgtgtacttctgtgcccggtccatcacaacagtcgtgggctgcgctatggactattggggccagggaacaagcgtgaccgtgtctagtacgcgtatccagaaccctgatcctgccgtgtaccagctgcgggatagcaagagcagcgacaagagcgtgtgtctgttcaccgacttcgacagccagaccaacgtgtcccagagcaaggactccgacgtgtacatcaccgataagtgcgtgctggacatgcggagcatggacttcaagagcaactccgccgtggcctggtccaacaagtccgatttcgcctgcgccaacgccttcaacaacagcattatccccgaggacacattcttcccaagccccgagagcagctgcgacgtgaagctggtggaaaagagcttcgagacagacaccaacctgaacttccagaacctgagcgtgatcggcttcagaatcctgctgctgaaagtggccggctttaacctgctgatgaccctgcggctgtggtccagctaa

SEQ ID NO: 8117 - DNA, 1962 bp, synthetic construct
  source 1..1962: mol_type = other DNA
atggccttaccagtgaccgccttgctcctgccgctggccttgctgctccacgccgccaggccggcatgcgcccgcagcgaggcccgctaccgcggtaccggcggaggcggatctggcggcggaggtagcggtggcggaggatctgaattcgacatccagatgacacagagccctagcagcctgtctgccagcgtgggagacagagtgaccatcacatgcaaggccagcgaccacatcaacaactggctggcctggtatcagcagaagcctggacaggcccctaagctgctgatctacggcgctaccacactggaaacaggcgtgcccagcagattttctggcagcggctctggcaccgactacaccctgacaatatccagcctccagcctgaggacttcgccacctactactgtcagcagagctggaacaccccttggacattcggccagggcaccaagctggaaatcaagagactcgaggacctgaagaacgtgttcccacctgaggtggccgtgttcgagcctagcgaggccgagatcagccacacccagaaagccaccctcgtgtgcctggctaccggcttctaccccgaccatgtggaactgtcttggtgggtcaacggcaaagaggtgcacagcggcgtgtgtaccgacccccagccactgaaagaacagcccgccctgaacgacagccggtactgcctgagcagcagactgagagtgtccgccaccttctggcagaacccccggaaccacttcagatgccaggtgcagttctacggcctgagcgagaacgacgagtggacccaggacagagccaagcccgtgacccagatcgtgtctgccgaagcctggggcagagccgattgcggctttaccagcgagagctaccagcagggcgtgctgagcgccaccatcctgtacgagatcctgctgggcaaggccaccctgtacgccgtgctggtgtctgccctggtgctgatggctatggtcaagcggaaggacagccggggaagggccaagcgatctggatctggagcaacaaacttctcactactcaaacaagcaggtgacgtggaggagaatcccgggcctactagtgccaccatggactggatttggcgcatccttttccttgtcggcgctgctaccggcgcccattccttcgaacaagttcagcttcaacagcctggcgctgagctggtcaaacctggcgcttctgtgaagatgagctgcaaagccagcggctacgccttcagcagctactggatcaactggatgaagcagaaacccggccagggactcgaatggatcggccaaatctatcccggcgacggcgacaccaactacaacggcaagttcaagggcagagccacactgaccgccgatacctctagcagcacagcctacatgcagctgagcagcctgaccagcgaagatagcgccgtgtacttctgtgcccggtccatcacaacagtcgtgggctgcgctatggactattggggccagggaacaagcgtgaccgtgtctagtacgcgtatccagaaccctgatcctgccgtgtaccagctgcgggatagcaagagcagcgacaagagcgtgtgtctgttcaccgacttcgacagccagaccaacgtgtcccagagcaaggactccgacgtgtacatcaccgataagtgcgtgctggacatgcggagcatggacttcaagagcaactccgccgtggcctggtccaacaagtccgatttcgcctgcgccaacgccttcaacaacagcattatccccgaggacacattcttcccaagccccgagagcagctgcgacgtgaagctggtggaaaagagcttcgagacagacaccaacctgaacttccagaacctgagcgtgatcggcttcagaatcctgctgctgaaagtggccggctttaacctgctgatgaccctgcggctgtggtccagctaa

SEQ ID NO: 8118 - DNA, 1962 bp, synthetic construct
  source 1..1962: mol_type = other DNA
atggccttaccagtgaccgccttgctcctgccgctggccttgctgctccacgccgccaggccggcatgcgcccgcagcgagcagcgctaccgcggtaccggcggaggcggatctggcggcggaggtagcggtggcggaggatctgaattcgacatccagatgacacagagccctagcagcctgtctgccagcgtgggagacagagtgaccatcacatgcaaggccagcgaccacatcaacaactggctggcctggtatcagcagaagcctggacaggcccctaagctgctgatctacggcgctaccacactggaaacaggcgtgcccagcagattttctggcagcggctctggcaccgactacaccctgacaatatccagcctccagcctgaggacttcgccacctactactgtcagcagagctggaacaccccttggacattcggccagggcaccaagctggaaatcaagagactcgaggacctgaagaacgtgttcccacctgaggtggccgtgttcgagcctagcgaggccgagatcagccacacccagaaagccaccctcgtgtgcctggctaccggcttctaccccgaccatgtggaactgtcttggtgggtcaacggcaaagaggtgcacagcggcgtgtgtaccgacccccagccactgaaagaacagcccgccctgaacgacagccggtactgcctgagcagcagactgagagtgtccgccaccttctggcagaacccccggaaccacttcagatgccaggtgcagttctacggcctgagcgagaacgacgagtggacccaggacagagccaagcccgtgacccagatcgtgtctgccgaagcctggggcagagccgattgcggctttaccagcgagagctaccagcagggcgtgctgagcgccaccatcctgtacgagatcctgctgggcaaggccaccctgtacgccgtgctggtgtctgccctggtgctgatggctatggtcaagcggaaggacagccggggaagggccaagcgatctggatctggagcaacaaacttctcactactcaaacaagcaggtgacgtggaggagaatcccgggcctactagtgccaccatggactggatttggcgcatccttttccttgtcggcgctgctaccggcgcccattccttcgaacaagttcagcttcaacagcctggcgctgagctggtcaaacctggcgcttctgtgaagatgagctgcaaagccagcggctacgccttcagcagctactggatcaactggatgaagcagaaacccggccagggactcgaatggatcggccaaatctatcccggcgacggcgacaccaactacaacggcaagttcaagggcagagccacactgaccgccgatacctctagcagcacagcctacatgcagctgagcagcctgaccagcgaagatagcgccgtgtacttctgtgcccggtccatcacaacagtcgtgggctgcgctatggactattggggccagggaacaagcgtgaccgtgtctagtacgcgtatccagaaccctgatcctgccgtgtaccagctgcgggatagcaagagcagcgacaagagcgtgtgtctgttcaccgacttcgacagccagaccaacgtgtcccagagcaaggactccgacgtgtacatcaccgataagtgcgtgctggacatgcggagcatggacttcaagagcaactccgccgtggcctggtccaacaagtccgatttcgcctgcgccaacgccttcaacaacagcattatccccgaggacacattcttcccaagccccgagagcagctgcgacgtgaagctggtggaaaagagcttcgagacagacaccaacctgaacttccagaacctgagcgtgatcggcttcagaatcctgctgctgaaagtggccggctttaacctgctgatgaccctgcggctgtggtccagctaa

SEQ ID NO: 8119 - DNA, 1962 bp, synthetic construct
  source 1..1962: mol_type = other DNA
atggccttaccagtgaccgccttgctcctgccgctggccttgctgctccacgccgccaggccggcatgcgcccgcagcgagaagcgctaccgcggtaccggcggaggcggatctggcggcggaggtagcggtggcggaggatctgaattcgacatccagatgacacagagccctagcagcctgtctgccagcgtgggagacagagtgaccatcacatgcaaggccagcgaccacatcaacaactggctggcctggtatcagcagaagcctggacaggcccctaagctgctgatctacggcgctaccacactggaaacaggcgtgcccagcagattttctggcagcggctctggcaccgactacaccctgacaatatccagcctccagcctgaggacttcgccacctactactgtcagcagagctggaacaccccttggacattcggccagggcaccaagctggaaatcaagagactcgaggacctgaagaacgtgttcccacctgaggtggccgtgttcgagcctagcgaggccgagatcagccacacccagaaagccaccctcgtgtgcctggctaccggcttctaccccgaccatgtggaactgtcttggtgggtcaacggcaaagaggtgcacagcggcgtgtgtaccgacccccagccactgaaagaacagcccgccctgaacgacagccggtactgcctgagcagcagactgagagtgtccgccaccttctggcagaacccccggaaccacttcagatgccaggtgcagttctacggcctgagcgagaacgacgagtggacccaggacagagccaagcccgtgacccagatcgtgtctgccgaagcctggggcagagccgattgcggctttaccagcgagagctaccagcagggcgtgctgagcgccaccatcctgtacgagatcctgctgggcaaggccaccctgtacgccgtgctggtgtctgccctggtgctgatggctatggtcaagcggaaggacagccggggaagggccaagcgatctggatctggagcaacaaacttctcactactcaaacaagcaggtgacgtggaggagaatcccgggcctactagtgccaccatggactggatttggcgcatccttttccttgtcggcgctgctaccggcgcccattccttcgaacaagttcagcttcaacagcctggcgctgagctggtcaaacctggcgcttctgtgaagatgagctgcaaagccagcggctacgccttcagcagctactggatcaactggatgaagcagaaacccggccagggactcgaatggatcggccaaatctatcccggcgacggcgacaccaactacaacggcaagttcaagggcagagccacactgaccgccgatacctctagcagcacagcctacatgcagctgagcagcctgaccagcgaagatagcgccgtgtacttctgtgcccggtccatcacaacagtcgtgggctgcgctatggactattggggccagggaacaagcgtgaccgtgtctagtacgcgtatccagaaccctgatcctgccgtgtaccagctgcgggatagcaagagcagcgacaagagcgtgtgtctgttcaccgacttcgacagccagaccaacgtgtcccagagcaaggactccgacgtgtacatcaccgataagtgcgtgctggacatgcggagcatggacttcaagagcaactccgccgtggcctggtccaacaagtccgatttcgcctgcgccaacgccttcaacaacagcattatccccgaggacacattcttcccaagccccgagagcagctgcgacgtgaagctggtggaaaagagcttcgagacagacaccaacctgaacttccagaacctgagcgtgatcggcttcagaatcctgctgctgaaagtggccggctttaacctgctgatgaccctgcggctgtggtccagctaa

SEQ ID NO: 8120 - DNA, 1962 bp, synthetic construct
  source 1..1962: mol_type = other DNA
atggccttaccagtgaccgccttgctcctgccgctggccttgctgctccacgccgccaggccggcatgcgcccgcagcgagctgcgctaccgcggtaccggcggaggcggatctggcggcggaggtagcggtggcggaggatctgaattcgacatccagatgacacagagccctagcagcctgtctgccagcgtgggagacagagtgaccatcacatgcaaggccagcgaccacatcaacaactggctggcctggtatcagcagaagcctggacaggcccctaagctgctgatctacggcgctaccacactggaaacaggcgtgcccagcagattttctggcagcggctctggcaccgactacaccctgacaatatccagcctccagcctgaggacttcgccacctactactgtcagcagagctggaacaccccttggacattcggccagggcaccaagctggaaatcaagagactcgaggacctgaagaacgtgttcccacctgaggtggccgtgttcgagcctagcgaggccgagatcagccacacccagaaagccaccctcgtgtgcctggctaccggcttctaccccgaccatgtggaactgtcttggtgggtcaacggcaaagaggtgcacagcggcgtgtgtaccgacccccagccactgaaagaacagcccgccctgaacgacagccggtactgcctgagcagcagactgagagtgtccgccaccttctggcagaacccccggaaccacttcagatgccaggtgcagttctacggcctgagcgagaacgacgagtggacccaggacagagccaagcccgtgacccagatcgtgtctgccgaagcctggggcagagccgattgcggctttaccagcgagagctaccagcagggcgtgctgagcgccaccatcctgtacgagatcctgctgggcaaggccaccctgtacgccgtgctggtgtctgccctggtgctgatggctatggtcaagcggaaggacagccggggaagggccaagcgatctggatctggagcaacaaacttctcactactcaaacaagcaggtgacgtggaggagaatcccgggcctactagtgccaccatggactggatttggcgcatccttttccttgtcggcgctgctaccggcgcccattccttcgaacaagttcagcttcaacagcctggcgctgagctggtcaaacctggcgcttctgtgaagatgagctgcaaagccagcggctacgccttcagcagctactggatcaactggatgaagcagaaacccggccagggactcgaatggatcggccaaatctatcccggcgacggcgacaccaactacaacggcaagttcaagggcagagccacactgaccgccgatacctctagcagcacagcctacatgcagctgagcagcctgaccagcgaagatagcgccgtgtacttctgtgcccggtccatcacaacagtcgtgggctgcgctatggactattggggccagggaacaagcgtgaccgtgtctagtacgcgtatccagaaccctgatcctgccgtgtaccagctgcgggatagcaagagcagcgacaagagcgtgtgtctgttcaccgacttcgacagccagaccaacgtgtcccagagcaaggactccgacgtgtacatcaccgataagtgcgtgctggacatgcggagcatggacttcaagagcaactccgccgtggcctggtccaacaagtccgatttcgcctgcgccaacgccttcaacaacagcattatccccgaggacacattcttcccaagccccgagagcagctgcgacgtgaagctggtggaaaagagcttcgagacagacaccaacctgaacttccagaacctgagcgtgatcggcttcagaatcctgctgctgaaagtggccggctttaacctgctgatgaccctgcggctgtggtccagctaa

SEQ ID NO: 8121 - DNA, 1962 bp, synthetic construct
  source 1..1962: mol_type = other DNA
atggccttaccagtgaccgccttgctcctgccgctggccttgctgctccacgccgccaggccggcatgcgcccgcagcgagacccgctaccgcggtaccggcggaggcggatctggcggcggaggtagcggtggcggaggatctgaattcgacatccagatgacacagagccctagcagcctgtctgccagcgtgggagacagagtgaccatcacatgcaaggccagcgaccacatcaacaactggctggcctggtatcagcagaagcctggacaggcccctaagctgctgatctacggcgctaccacactggaaacaggcgtgcccagcagattttctggcagcggctctggcaccgactacaccctgacaatatccagcctccagcctgaggacttcgccacctactactgtcagcagagctggaacaccccttggacattcggccagggcaccaagctggaaatcaagagactcgaggacctgaagaacgtgttcccacctgaggtggccgtgttcgagcctagcgaggccgagatcagccacacccagaaagccaccctcgtgtgcctggctaccggcttctaccccgaccatgtggaactgtcttggtgggtcaacggcaaagaggtgcacagcggcgtgtgtaccgacccccagccactgaaagaacagcccgccctgaacgacagccggtactgcctgagcagcagactgagagtgtccgccaccttctggcagaacccccggaaccacttcagatgccaggtgcagttctacggcctgagcgagaacgacgagtggacccaggacagagccaagcccgtgacccagatcgtgtctgccgaagcctggggcagagccgattgcggctttaccagcgagagctaccagcagggcgtgctgagcgccaccatcctgtacgagatcctgctgggcaaggccaccctgtacgccgtgctggtgtctgccctggtgctgatggctatggtcaagcggaaggacagccggggaagggccaagcgatctggatctggagcaacaaacttctcactactcaaacaagcaggtgacgtggaggagaatcccgggcctactagtgccaccatggactggatttggcgcatccttttccttgtcggcgctgctaccggcgcccattccttcgaacaagttcagcttcaacagcctggcgctgagctggtcaaacctggcgcttctgtgaagatgagctgcaaagccagcggctacgccttcagcagctactggatcaactggatgaagcagaaacccggccagggactcgaatggatcggccaaatctatcccggcgacggcgacaccaactacaacggcaagttcaagggcagagccacactgaccgccgatacctctagcagcacagcctacatgcagctgagcagcctgaccagcgaagatagcgccgtgtacttctgtgcccggtccatcacaacagtcgtgggctgcgctatggactattggggccagggaacaagcgtgaccgtgtctagtacgcgtatccagaaccctgatcctgccgtgtaccagctgcgggatagcaagagcagcgacaagagcgtgtgtctgttcaccgacttcgacagccagaccaacgtgtcccagagcaaggactccgacgtgtacatcaccgataagtgcgtgctggacatgcggagcatggacttcaagagcaactccgccgtggcctggtccaacaagtccgatttcgcctgcgccaacgccttcaacaacagcattatccccgaggacacattcttcccaagccccgagagcagctgcgacgtgaagctggtggaaaagagcttcgagacagacaccaacctgaacttccagaacctgagcgtgatcggcttcagaatcctgctgctgaaagtggccggctttaacctgctgatgaccctgcggctgtggtccagctaa

SEQ ID NO: 8122 - DNA, 1962 bp, synthetic construct; identical to SEQ ID NO: 8103
  source 1..1962: mol_type = other DNA

SEQ ID NO: 8123 - DNA, 1962 bp, synthetic construct
  source 1..1962: mol_type = other DNA
atggccttaccagtgaccgccttgctcctgccgctggccttgctgctccacgccgccaggccggcatgcgcccgcagcgaggaccactacaagggtaccggcggaggcggatctggcggcggaggtagcggtggcggaggatctgaattcgacatccagatgacacagagccctagcagcctgtctgccagcgtgggagacagagtgaccatcacatgcaaggccagcgaccacatcaacaactggctggcctggtatcagcagaagcctggacaggcccctaagctgctgatctacggcgctaccacactggaaacaggcgtgcccagcagattttctggcagcggctctggcaccgactacaccctgacaatatccagcctccagcctgaggacttcgccacctactactgtcagcagagctggaacaccccttggacattcggccagggcaccaagctggaaatcaagagactcgaggacctgaagaacgtgttcccacctgaggtggccgtgttcgagcctagcgaggccgagatcagccacacccagaaagccaccctcgtgtgcctggctaccggcttctaccccgaccatgtggaactgtcttggtgggtcaacggcaaagaggtgcacagcggcgtgtgtaccgacccccagccactgaaagaacagcccgccctgaacgacagccggtactgcctgagcagcagactgagagtgtccgccaccttctggcagaacccccggaaccacttcagatgccaggtgcagttctacggcctgagcgagaacgacgagtggacccaggacagagccaagcccgtgacccagatcgtgtctgccgaagcctggggcagagccgattgcggctttaccagcgagagctaccagcagggcgtgctgagcgccaccatcctgtacgagatcctgctgggcaaggccaccctgtacgccgtgctggtgtctgccctggtgctgatggctatggtcaagcggaaggacagccggggaagggccaagcgatctggatctggagcaacaaacttctcactactcaaacaagcaggtgacgtggaggagaatcccgggcctactagtgccaccatggactggatttggcgcatccttttccttgtcggcgctgctaccggcgcccattccttcgaacaagttcagcttcaacagcctggcgctgagctggtcaaacctggcgcttctgtgaagatgagctgcaaagccagcggctacgccttcagcagctactggatcaactggatgaagcagaaacccggccagggactcgaatggatcggccaaatctatcccggcgacggcgacaccaactacaacggcaagttcaagggcagagccacactgaccgccgatacctctagcagcacagcctacatgcagctgagcagcctgaccagcgaagatagcgccgtgtacttctgtgcccggtccatcacaacagtcgtgggctgcgctatggactattggggccagggaacaagcgtgaccgtgtctagtacgcgtatccagaaccctgatcctgccgtgtaccagctgcgggatagcaagagcagcgacaagagcgtgtgtctgttcaccgacttcgacagccagaccaacgtgtcccagagcaaggactccgacgtgtacatcaccgataagtgcgtgctggacatgcggagcatggacttcaagagcaactccgccgtggcctggtccaacaagtccgatttcgcctgcgccaacgccttcaacaacagcattatccccgaggacacattcttcccaagccccgagagcagctgcgacgtgaagctggtggaaaagagcttcgagacagacaccaacctgaacttccagaacctgagcgtgatcggcttcagaatcctgctgctgaaagtggccggctttaacctgctgatgaccctgcggctgtggtccagctaa

SEQ ID NO: 8124 - DNA, 1962 bp, synthetic construct
  source 1..1962: mol_type = other DNA
atggccttaccagtgaccgccttgctcctgccgctggccttgctgctccacgccgccaggccggcatgcgcccgcagcgagagccgctacaagggtaccggcggaggcggatctggcggcggaggtagcggtggcggaggatctgaattcgacatccagatgacacagagccctagcagcctgtctgccagcgtgggagacagagtgaccatcacatgcaaggccagcgaccacatcaacaactggctggcctggtatcagcagaagcctggacaggcccctaagctgctgatctacggcgctaccacactggaaacaggcgtgcccagcagattttctggcagcggctctggcaccgactacaccctgacaatatccagcctccagcctgaggacttcgccacctactactgtcagcagagctggaacaccccttggacattcggccagggcaccaagctggaaatcaagagactcgaggacctgaagaacgtgttcccacctgaggtggccgtgttcgagcctagcgaggccgagatcagccacacccagaaagccaccctcgtgtgcctggctaccggcttctaccccgaccatgtggaactgtcttggtgggtcaacggcaaagaggtgcacagcggcgtgtgtaccgacccccagccactgaaagaacagcccgccctgaacgacagccggtactgcctgagcagcagactgagagtgtccgccaccttctggcagaacccccggaaccacttcagatgccaggtgcagttctacggcctgagcgagaacgacgagtggacccaggacagagccaagcccgtgacccagatcgtgtctgccgaagcctggggcagagccgattgcggctttaccagcgagagctaccagcagggcgtgctgagcgccaccatcctgtacgagatcctgctgggcaaggccaccctgtacgccgtgctggtgtctgccctggtgctgatggctatggtcaagcggaaggacagccggggaagggccaagcgatctggatctggagcaacaaacttctcactactcaaacaagcaggtgacgtggaggagaatcccgggcctactagtgccaccatggactggatttggcgcatccttttccttgtcggcgctgctaccggcgcccattccttcgaacaagttcagcttcaacagcctggcgctgagctggtcaaacctggcgcttctgtgaagatgagctgcaaagccagcggctacgccttcagcagctactggatcaactggatgaagcagaaacccggccagggactcgaatggatcggccaaatctatcccggcgacggcgacaccaactacaacggcaagttcaagggcagagccacactgaccgccgatacctctagcagcacagcctacatgcagctgagcagcctgaccagcgaagatagcgccgtgtacttctgtgcccggtccatcacaacagtcgtgggctgcgctatggactattggggccagggaacaagcgtgaccgtgtctagtacgcgtatccagaaccctgatcctgccgtgtaccagctgcgggatagcaagagcagcgacaagagcgtgtgtctgttcaccgacttcgacagccagaccaacgtgtcccagagcaaggactccgacgtgtacatcaccgataagtgcgtgctggacatgcggagcatggacttcaagagcaactccgccgtggcctggtccaacaagtccgatttcgcctgcgccaacgccttcaacaacagcattatccccgaggacacattcttcccaagccccgagagcagctgcgacgtgaagctggtggaaaagagcttcgagacagacaccaacctgaacttccagaacctgagcgtgatcggcttcagaatcctgctgctgaaagtggccggctttaacctgctgatgaccctgcggctgtggtccagctaa

SEQ ID NO: 8125 - DNA, 1962 bp, synthetic construct
  source 1..1962: mol_type = other DNA
atggccttaccagtgaccgccttgctcctgccgctggccttgctgctccacgccgccaggccggcatgcgcccgcagcgagaaccgctacaagggtaccggcggaggcggatctggcggcggaggtagcggtggcggaggatctgaattcgacatccagatgacacagagccctagcagcctgtctgccagcgtgggagacagagtgaccatcacatgcaaggccagcgaccacatcaacaactggctggcctggtatcagcagaagcctggacaggcccctaagctgctgatctacggcgctaccacactggaaacaggcgtgcccagcagattttctggcagcggctctggcaccgactacaccctgacaatatccagcctccagcctgaggacttcgccacctactactgtcagcagagctggaacaccccttggacattcggccagggcaccaagctggaaatcaagagactcgaggacctgaagaacgtgttcccacctgaggtggccgtgttcgagcctagcgaggccgagatcagccacacccagaaagccaccctcgtgtgcctggctaccggcttctaccccgaccatgtggaactgtcttggtgggtcaacggcaaagaggtgcacagcggcgtgtgtaccgacccccagccactgaaagaacagcccgccctgaacgacagccggtactgcctgagcagcagactgagagtgtccgccaccttctggcagaacccccggaaccacttcagatgccaggtgcagttctacggcctgagcgagaacgacgagtggacccaggacagagccaagcccgtgacccagatcgtgtctgccgaagcctggggcagagccgattgcggctttaccagcgagagctaccagcagggcgtgctgagcgccaccatcctgtacgagatcctgctgggcaaggccaccctgtacgccgtgctggtgtctgccctggtgctgatggctatggtcaagcggaaggacagccggggaagggccaagcgatctggatctggagcaacaaacttctcactactcaaacaagcaggtgacgtggaggagaatcccgggcctactagtgccaccatggactggatttggcgcatccttttccttgtcggcgctgctaccggcgcccattccttcgaacaagttcagcttcaacagcctggcgctgagctggtcaaacctggcgcttctgtgaagatgagctgcaaagccagcggctacgccttcagcagctactggatcaactggatgaagcagaaacccggccagggactcgaatggatcggccaaatctatcccggcgacggcgacaccaactacaacggcaagttcaagggcagagccacactgaccgccgatacctctagcagcacagcctacatgcagctgagcagcctgaccagcgaagatagcgccgtgtacttctgtgcccggtccatcacaacagtcgtgggctgcgctatggactattggggccagggaacaagcgtgaccgtgtctagtacgcgtatccagaaccctgatcctgccgtgtaccagctgcgggatagcaagagcagcgacaagagcgtgtgtctgttcaccgacttcgacagccagaccaacgtgtcccagagcaaggactccgacgtgtacatcaccgataagtgcgtgctggacatgcggagcatggacttcaagagcaactccgccgtggcctggtccaacaagtccgatttcgcctgcgccaacgccttcaacaacagcattatccccgaggacacattcttcccaagccccgagagcagctgcgacgtgaagctggtggaaaagagcttcgagacagacaccaacctgaacttccagaacctgagcgtgatcggcttcagaatcctgctgctgaaagtggccggctttaacctgctgatgaccctgcggctgtggtccagctaa

SEQ ID NO: 8126 - DNA, 1962 bp, synthetic construct
  source 1..1962: mol_type = other DNA
atggccttaccagtgaccgccttgctcctgccgctggccttgctgctccacgccgccaggccggcatgcgcccgcagcgagggccgctacaagggtaccggcggaggcggatctggcggcggaggtagcggtggcggaggatctgaattcgacatccagatgacacagagccctagcagcctgtctgccagcgtgggagacagagtgaccatcacatgcaaggccagcgaccacatcaacaactggctggcctggtatcagcagaagcctggacaggcccctaagctgctgatctacggcgctaccacactggaaacaggcgtgcccagcagattttctggcagcggctctggcaccgactacaccctgacaatatccagcctccagcctgaggacttcgccacctactactgtcagcagagctggaacaccccttggacattcggccagggcaccaagctggaaatcaagagactcgaggacctgaagaacgtgttcccacctgaggtggccgtgttcgagcctagcgaggccgagatcagccacacccagaaagccaccctcgtgtgcctggctaccggcttctaccccgaccatgtggaactgtcttggtgggtcaacggcaaagaggtgcacagcggcgtgtgtaccgacccccagccactgaaagaacagcccgccctgaacgacagccggtactgcctgagcagcagactgagagtgtccgccaccttctggcagaacccccggaaccacttcagatgccaggtgcagttctacggcctgagcgagaacgacgagtggacccaggacagagccaagcccgtgacccagatcgtgtctgccgaagcctggggcagagccgattgcggctttaccagcgagagctaccagcagggcgtgctgagcgccaccatcctgtacgagatcctgctgggcaaggccaccctgtacgccgtgctggtgtctgccctggtgctgatggctatggtcaagcggaaggacagccggggaagggccaagcgatctggatctggagcaacaaacttctcactactcaaacaagcaggtgacgtggaggagaatcccgggcctactagtgccaccatggactggatttggcgcatccttttccttgtcggcgctgctaccggcgcccattccttcgaacaagttcagcttcaacagcctggcgctgagctggtcaaacctggcgcttctgtgaagatgagctgcaaagccagcggctacgccttcagcagctactggatcaactggatgaagcagaaacccggccagggactcgaatggatcggccaaatctatcccggcgacggcgacaccaactacaacggcaagttcaagggcagagccacactgaccgccgatacctctagcagcacagcctacatgcagctgagcagcctgaccagcgaagatagcgccgtgtacttctgtgcccggtccatcacaacagtcgtgggctgcgctatggactattggggccagggaacaagcgtgaccgtgtctagtacgcgtatccagaaccctgatcctgccgtgtaccagctgcgggatagcaagagcagcgacaagagcgtgtgtctgttcaccgacttcgacagccagaccaacgtgtcccagagcaaggactccgacgtgtacatcaccgataagtgcgtgctggacatgcggagcatggacttcaagagcaactccgccgtggcctggtccaacaagtccgatttcgcctgcgccaacgccttcaacaacagcattatccccgaggacacattcttcccaagccccgagagcagctgcgacgtgaagctggtggaaaagagcttcgagacagacaccaacctgaacttccagaacctgagcgtgatcggcttcagaatcctgctgctgaaagtggccggctttaacctgctgatgaccctgcggctgtggtccagctaa

SEQ ID NO: 8127 - DNA, 1962 bp, synthetic construct
  source 1..1962: mol_type = other DNA
atggccttaccagtgaccgccttgctcctgccgctggccttgctgctccacgccgccaggccggcatgcgcccgcagcgaggcccgctacaagggtaccggcggaggcggatctggcggcggaggtagcggtggcggaggatctgaattcgacatccagatgacacagagccctagcagcctgtctgccagcgtgggagacagagtgaccatcacatgcaaggccagcgaccacatcaacaactggctggcctggtatcagcagaagcctggacaggcccctaagctgctgatctacggcgctaccacactggaaacaggcgtgcccagcagattttctggcagcggctctggcaccgactacaccctgacaatatccagcctccagcctgaggacttcgccacctactactgtcagcagagctggaacaccccttggacattcggccagggcaccaagctggaaatcaagagactcgaggacctgaagaacgtgttcccacctgaggtggccgtgttcgagcctagcgaggccgagatcagccacacccagaaagccaccctcgtgtgcctggctaccggcttctaccccgaccatgtggaactgtcttggtgggtcaacggcaaagaggtgcacagcggcgtgtgtaccgacccccagccactgaaagaacagcccgccctgaacgacagccggtactgcctgagcagcagactgagagtgtccgccaccttctggcagaacccccggaaccacttcagatgccaggtgcagttctacggcctgagcgagaacgacgagtggacccaggacagagccaagcccgtgacccagatcgtgtctgccgaagcctggggcagagccgattgcggctttaccagcgagagctaccagcagggcgtgctgagcgccaccatcctgtacgagatcctgctgggcaaggccaccctgtacgccgtgctggtgtctgccctggtgctgatggctatggtcaagcggaaggacagccggggaagggccaagcgatctggatctggagcaacaaacttctcactactcaaacaagcaggtgacgtggaggagaatcccgggcctactagtgccaccatggactggatttggcgcatccttttccttgtcggcgctgctaccggcgcccattccttcgaacaagttcagcttcaacagcctggcgctgagctggtcaaacctggcgcttctgtgaagatgagctgcaaagccagcggctacgccttcagcagctactggatcaactggatgaagcagaaacccggccagggactcgaatggatcggccaaatctatcccggcgacggcgacaccaactacaacggcaagttcaagggcagagccacactgaccgccgatacctctagcagcacagcctacatgcagctgagcagcctgaccagcgaagatagcgccgtgtacttctgtgcccggtccatcacaacagtcgtgggctgcgctatggactattggggccagggaacaagcgtgaccgtgtctagtacgcgtatccagaaccctgatcctgccgtgtaccagctgcgggatagcaagagcagcgacaagagcgtgtgtctgttcaccgacttcgacagccagaccaacgtgtcccagagcaaggactccgacgtgtacatcaccgataagtgcgtgctggacatgcggagcatggacttcaagagcaactccgccgtggcctggtccaacaagtccgatttcgcctgcgccaacgccttcaacaacagcattatccccgaggacacattcttcccaagccccgagagcagctgcgacgtgaagctggtggaaaagagcttcgagacagacaccaacctgaacttccagaacctgagcgtgatcggcttcagaatcctgctgctgaaagtggccggctttaacctgctgatgaccctgcggctgtggtccagctaa

SEQ ID NO: 8128 - DNA, 1962 bp, synthetic construct
  source 1..1962: mol_type = other DNA
atggccttaccagtgaccgccttgctcctgccgctggccttgctgctccacgccgccaggccggcatgcgcccgcagcgagaagcgctacaagggtaccggcggaggcggatctggcggcggaggtagcggtggcggaggatctgaattcgacatccagatgacacagagccctagcagcctgtctgccagcgtgggagacagagtgaccatcacatgcaaggccagcgaccacatcaacaactggctggcctggtatcagcagaagcctggacaggcccctaagctgctgatctacggcgctaccacactggaaacaggcgtgcccagcagattttctggcagcggctctggcaccgactacaccctgacaatatccagcctccagcctgaggacttcgccacctactactgtcagcagagctggaacaccccttggacattcggccagggcaccaagctggaaatcaagagactcgaggacctgaagaacgtgttcccacctgaggtggccgtgttcgagcctagcgaggccgagatcagccacacccagaaagccaccctcgtgtgcctggctaccggcttctaccccgaccatgtggaactgtcttggtgggtcaacggcaaagaggtgcacagcggcgtgtgtaccgacccccagccactgaaagaacagcccgccctgaacgacagccggtactgcctgagcagcagactgagagtgtccgccaccttctggcagaacccccggaaccacttcagatgccaggtgcagttctacggcctgagcgagaacgacgagtggacccaggacagagccaagcccgtgacccagatcgtgtctgccgaagcctggggcagagccgattgcggctttaccagcgagagctaccagcagggcgtgctgagcgccaccatcctgtacgagatcctgctgggcaaggccaccctgtacgccgtgctggtgtctgccctggtgctgatggctatggtcaagcggaaggacagccggggaagggccaagcgatctggatctggagcaacaaacttctcactactcaaacaagcaggtgacgtggaggagaatcccgggcctactagtgccaccatggactggatttggcgcatccttttccttgtcggcgctgctaccggcgcccattccttcgaacaagttcagcttcaacagcctggcgctgagctggtcaaacctggcgcttctgtgaagatgagctgcaaagccagcggctacgccttcagcagctactggatcaactggatgaagcagaaacccggccagggactcgaatggatcggccaaatctatcccggcgacggcgacaccaactacaacggcaagttcaagggcagagccacactgaccgccgatacctctagcagcacagcctacatgcagctgagcagcctgaccagcgaagatagcgccgtgtacttctgtgcccggtccatcacaacagtcgtgggctgcgctatggactattggggccagggaacaagcgtgaccgtgtctagtacgcgtatccagaaccctgatcctgccgtgtaccagctgcgggatagcaagagcagcgacaagagcgtgtgtctgttcaccgacttcgacagccagaccaacgtgtcccagagcaaggactccgacgtgtacatcaccgataagtgcgtgctggacatgcggagcatggacttcaagagcaactccgccgtggcctggtccaacaagtccgatttcgcctgcgccaacgccttcaacaacagcattatccccgaggacacattcttcccaagccccgagagcagctgcgacgtgaagctggtggaaaagagcttcgagacagacaccaacctgaacttccagaacctgagcgtgatcggcttcagaatcctgctgctgaaagtggccggctttaacctgctgatgaccctgcggctgtggtccagctaa

SEQ ID NO: 8129 - DNA, 1962 bp, synthetic construct
  source 1..1962: mol_type = other DNA
atggccttaccagtgaccgccttgctcctgccgctggccttgctgctccacgccgccaggccggcatgcgcccgcagcgagctgcgctacaagggtaccggcggaggcggatctggcggcggaggtagcggtggcggaggatctgaattcgacatccagatgacacagagccctagcagcctgtctgccagcgtgggagacagagtgaccatcacatgcaaggccagcgaccacatcaacaactggctggcctggtatcagcagaagcctggacaggcccctaagctgctgatctacggcgctaccacactggaaacaggcgtgcccagcagattttctggcagcggctctggcaccgactacaccctgacaatatccagcctccagcctgaggacttcgccacctactactgtcagcagagctggaacaccccttggacattcggccagggcaccaagctggaaatcaagagactcgaggacctgaagaacgtgttcccacctgaggtggccgtgttcgagcctagcgaggccgagatcagccacacccagaaagccaccctcgtgtgcctggctaccggcttctaccccgaccatgtggaactgtcttggtgggtcaacggcaaagaggtgcacagcggcgtgtgtaccgacccccagccactgaaagaacagcccgccctgaacgacagccggtactgcctgagcagcagactgagagtgtccgccaccttctggcagaacccccggaaccacttcagatgccaggtgcagttctacggcctgagcgagaacgacgagtggacccaggacagagccaagcccgtgacccagatcgtgtctgccgaagcctggggcagagccgattgcggctttaccagcgagagctaccagcagggcgtgctgagcgccaccatcctgtacgagatcctgctgggcaaggccaccctgtacgccgtgctggtgtctgccctggtgctgatggctatggtcaagcggaaggacagccggggaagggccaagcgatctggatctggagcaacaaacttctcactactcaaacaagcaggtgacgtggaggagaatcccgggcctactagtgccaccatggactggatttggcgcatccttttccttgtcggcgctgctaccggcgcccattccttcgaacaagttcagcttcaacagcctggcgctgagctggtcaaacctggcgcttctgtgaagatgagctgcaaagccagcggctacgccttcagcagctactggatcaactggatgaagcagaaacccggccagggactcgaatggatcggccaaatctatcccggcgacggcgacaccaactacaacggcaagttcaagggcagagccacactgaccgccgatacctctagcagcacagcctacatgcagctgagcagcctgaccagcgaagatagcgccgtgtacttctgtgcccggtccatcacaacagtcgtgggctgcgctatggactattggggccagggaacaagcgtgaccgtgtctagtacgcgtatccagaaccctgatcctgccgtgtaccagctgcgggatagcaagagcagcgacaagagcgtgtgtctgttcaccgacttcgacagccagaccaacgtgtcccagagcaaggactccgacgtgtacatcaccgataagtgcgtgctggacatgcggagcatggacttcaagagcaactccgccgtggcctggtccaacaagtccgatttcgcctgcgccaacgccttcaacaacagcattatccccgaggacacattcttcccaagccccgagagcagctgcgacgtgaagctggtggaaaagagcttcgagacagacaccaacctgaacttccagaacctgagcgtgatcggcttcagaatcctgctgctgaaagtggccggctttaacctgctgatgaccctgcggctgtggtccagctaa

SEQ ID NO: 8130 - DNA, 1962 bp, synthetic construct
  source 1..1962: mol_type = other DNA
atggccttaccagtgaccgccttgctcctgccgctggccttgctgctccacgccgccaggccggcatgcgcccgcagcgagacccgctacaagggtaccggcggaggcggatctggcggcggaggtagcggtggcggaggatctgaattcgacatccagatgacacagagccctagcagcctgtctgccagcgtgggagacagagtgaccatcacatgcaaggccagcgaccacatcaacaactggctggcctggtatcagcagaagcctggacaggcccctaagctgctgatctacggcgctaccacactggaaacaggcgtgcccagcagattttctggcagcggctctggcaccgactacaccctgacaatatccagcctccagcctgaggacttcgccacctactactgtcagcagagctggaacaccccttggacattcggccagggcaccaagctggaaatcaagagactcgaggacctgaagaacgtgttcccacctgaggtggccgtgttcgagcctagcgaggccgagatcagccacacccagaaagccaccctcgtgtgcctggctaccggcttctaccccgaccatgtggaactgtcttggtgggtcaacggcaaagaggtgcacagcggcgtgtgtaccgacccccagccactgaaagaacagcccgccctgaacgacagccggtactgcctgagcagcagactgagagtgtccgccaccttctggcagaacccccggaaccacttcagatgccaggtgcagttctacggcctgagcgagaacgacgagtggacccaggacagagccaagcccgtgacccagatcgtgtctgccgaagcctggggcagagccgattgcggctttaccagcgagagctaccagcagggcgtgctgagcgccaccatcctgtacgagatcctgctgggcaaggccaccctgtacgccgtgctggtgtctgccctggtgctgatggctatggtcaagcggaaggacagccggggaagggccaagcgatctggatctggagcaacaaacttctcactactcaaacaagcaggtgacgtggaggagaatcccgggcctactagtgccaccatggactggatttggcgcatccttttccttgtcggcgctgctaccggcgcccattccttcgaacaagttcagcttcaacagcctggcgctgagctggtcaaacctggcgcttctgtgaagatgagctgcaaagccagcggctacgccttcagcagctactggatcaactggatgaagcagaaacccggccagggactcgaatggatcggccaaatctatcccggcgacggcgacaccaactacaacggcaagttcaagggcagagccacactgaccgccgatacctctagcagcacagcctacatgcagctgagcagcctgaccagcgaagatagcgccgtgtacttctgtgcccggtccatcacaacagtcgtgggctgcgctatggactattggggccagggaacaagcgtgaccgtgtctagtacgcgtatccagaaccctgatcctgccgtgtaccagctgcgggatagcaagagcagcgacaagagcgtgtgtctgttcaccgacttcgacagccagaccaacgtgtcccagagcaaggactccgacgtgtacatcaccgataagtgcgtgctggacatgcggagcatggacttcaagagcaactccgccgtggcctggtccaacaagtccgatttcgcctgcgccaacgccttcaacaacagcattatccccgaggacacattcttcccaagccccgagagcagctgcgacgtgaagctggtggaaaagagcttcgagacagacaccaacctgaacttccagaacctgagcgtgatcggcttcagaatcctgctgctgaaagtggccggctttaacctgctgatgaccctgcggctgtggtccagctaa

SEQ ID NO: 8131 - DNA, 1962 bp, synthetic construct
  source 1..1962: mol_type = other DNA
atggccttaccagtgaccgccttgctcctgccgctggccttgctgctccacgccgccaggccggcatgcgcccgcagcgagcagcgctacaagggtaccggcggaggcggatctggcggcggaggtagcggtggcggaggatctgaattcgacatccagatgacacagagccctagcagcctgtctgccagcgtgggagacagagtgaccatcacatgcaaggccagcgaccacatcaacaactggctggcctggtatcagcagaagcctggacaggcccctaagctgctgatctacggcgctaccacactggaaacaggcgtgcccagcagattttctggcagcggctctggcaccgactacaccctgacaatatccagcctccagcctgaggacttcgccacctactactgtcagcagagctggaacaccccttggacattcggccagggcaccaagctggaaatcaagagactcgaggacctgaagaacgtgttcccacctgaggtggccgtgttcgagcctagcgaggccgagatcagccacacccagaaagccaccctcgtgtgcctggctaccggcttctaccccgaccatgtggaactgtcttggtgggtcaacggcaaagaggtgcacagcggcgtgtgtaccgacccccagccactgaaagaacagcccgccctgaacgacagccggtactgcctgagcagcagactgagagtgtccgccaccttctggcagaacccccggaaccacttcagatgccaggtgcagttctacggcctgagcgagaacgacgagtggacccaggacagagccaagcccgtgacccagatcgtgtctgccgaagcctggggcagagccgattgcggctttaccagcgagagctaccagcagggcgtgctgagcgccaccatcctgtacgagatcctgctgggcaaggccaccctgtacgccgtgctggtgtctgccctggtgctgatggctatggtcaagcggaaggacagccggggaagggccaagcgatctggatctggagcaacaaacttctcactactcaaacaagcaggtgacgtggaggagaatcccgggcctactagtgccaccatggactggatttggcgcatccttttccttgtcggcgctgctaccggcgcccattccttcgaacaagttcagcttcaacagcctggcgctgagctggtcaaacctggcgcttctgtgaagatgagctgcaaagccagcggctacgccttcagcagctactggatcaactggatgaagcagaaacccggccagggactcgaatggatcggccaaatctatcccggcgacggcgacaccaactacaacggcaagttcaagggcagagccacactgaccgccgatacctctagcagcacagcctacatgcagctgagcagcctgaccagcgaagatagcgccgtgtacttctgtgcccggtccatcacaacagtcgtgggctgcgctatggactattggggccagggaacaagcgtgaccgtgtctagtacgcgtatccagaaccctgatcctgccgtgtaccagctgcgggatagcaagagcagcgacaagagcgtgtgtctgttcaccgacttcgacagccagaccaacgtgtcccagagcaaggactccgacgtgtacatcaccgataagtgcgtgctggacatgcggagcatggacttcaagagcaactccgccgtggcctggtccaacaagtccgatttcgcctgcgccaacgccttcaacaacagcattatccccgaggacacattcttcccaagccccgagagcagctgcgacgtgaagctggtggaaaagagcttcgagacagacaccaacctgaacttccagaacctgagcgtgatcggcttcagaatcctgctgctgaaagtggccggctttaacctgctgatgaccctgcggctgtggtccagctaa

SEQ ID NO: 8132 - DNA, 1959 bp, synthetic construct
  source 1..1959: mol_type = other DNA
atggccttaccagtgaccgccttgctcctgccgctggccttgctgctccacgccgccaggccggcatgccgcagcgaggaccgctaccgcggtaccggcggaggcggatctggcggcggaggtagcggtggcggaggatctgaattcgacatccagatgacacagagccctagcagcctgtctgccagcgtgggagacagagtgaccatcacatgcaaggccagcgaccacatcaacaactggctggcctggtatcagcagaagcctggacaggcccctaagctgctgatctacggcgctaccacactggaaacaggcgtgcccagcagattttctggcagcggctctggcaccgactacaccctgacaatatccagcctccagcctgaggacttcgccacctactactgtcagcagagctggaacaccccttggacattcggccagggcaccaagctggaaatcaagagactcgaggacctgaagaacgtgttcccacctgaggtggccgtgttcgagcctagcgaggccgagatcagccacacccagaaagccaccctcgtgtgcctggctaccggcttctaccccgaccatgtggaactgtcttggtgggtcaacggcaaagaggtgcacagcggcgtgtgtaccgacccccagccactgaaagaacagcccgccctgaacgacagccggtactgcctgagcagcagactgagagtgtccgccaccttctggcagaacccccggaaccacttcagatgccaggtgcagttctacggcctgagcgagaacgacgagtggacccaggacagagccaagcccgtgacccagatcgtgtctgccgaagcctggggcagagccgattgcggctttaccagcgagagctaccagcagggcgtgctgagcgccaccatcctgtacgagatcctgctgggcaaggccaccctgtacgccgtgctggtgtctgccctggtgctgatggctatggtcaagcggaaggacagccggggaagggccaagcgatctggatctggagcaacaaacttctcactactcaaacaagcaggtgacgtggaggagaatcccgggcctactagtgccaccatggactggatttggcgcatccttttccttgtcggcgctgctaccggcgcccattccttcgaacaagttcagcttcaacagcctggcgctgagctggtcaaacctggcgcttctgtgaagatgagctgcaaagccagcggctacgccttcagcagctactggatcaactggatgaagcagaaacccggccagggactcgaatggatcggccaaatctatcccggcgacggcgacaccaactacaacggcaagttcaagggcagagccacactgaccgccgatacctctagcagcacagcctacatgcagctgagcagcctgaccagcgaagatagcgccgtgtacttctgtgcccggtccatcacaacagtcgtgggctgcgctatggactattggggccagggaacaagcgtgaccgtgtctagtacgcgtatccagaaccctgatcctgccgtgtaccagctgcgggatagcaagagcagcgacaagagcgtgtgtctgttcaccgacttcgacagccagaccaacgtgtcccagagcaaggactccgacgtgtacatcaccgataagtgcgtgctggacatgcggagcatggacttcaagagcaactccgccgtggcctggtccaacaagtccgatttcgcctgcgccaacgccttcaacaacagcattatccccgaggacacattcttcccaagccccgagagcagctgcgacgtgaagctggtggaaaagagcttcgagacagacaccaacctgaacttccagaacctgagcgtgatcggcttcagaatcctgctgctgaaagtggccggctttaacctgctgatgaccctgcggctgtggtccagctaa

SEQ ID NO: 8133 - DNA, 1962 bp, synthetic construct; identical to SEQ ID NO: 8086
  source 1..1962: mol_type = other DNA

SEQ ID NO: 8134 - DNA, 1962 bp, synthetic construct; identical to SEQ ID NO: 8114
  source 1..1962: mol_type = other DNA

SEQ ID NO: 8135 - DNA, 1962 bp, synthetic construct; identical to SEQ ID NO: 8121
  source 1..1962: mol_type = other DNA

SEQ ID NO: 8136 - DNA, 1962 bp, synthetic construct; identical to SEQ ID NO: 8115
  source 1..1962: mol_type = other DNA

SEQ ID NO: 8137 - DNA, 1962 bp, synthetic construct; identical to SEQ ID NO: 8116
  source 1..1962: mol_type = other DNA

SEQ ID NO: 8138 - DNA, 1959 bp, synthetic construct; identical to SEQ ID NO: 8085
  source 1..1959: mol_type = other DNA

SEQ ID NO: 8139 - DNA, 1962 bp, synthetic construct; identical to SEQ ID NO: 8086
  source 1..1962: mol_type = other DNA

SEQ ID NO: 8140 - DNA, 1965 bp, synthetic construct; identical to SEQ ID NO: 8087
  source 1..1965: mol_type = other DNA

SEQ ID NO: 8141 - DNA, 1968 bp, synthetic construct; identical to SEQ ID NO: 8088
  source 1..1968: mol_type = other DNA

SEQ ID NO: 8142 - DNA, 1971 bp, synthetic construct; identical to SEQ ID NO: 8089
  source 1..1971: mol_type = other DNA

SEQ ID NO: 8143 - DNA, 1974 bp, synthetic construct; identical to SEQ ID NO: 8090
  source 1..1974: mol_type = other DNA

SEQ ID NO: 8144 - DNA, 1977 bp, synthetic construct; identical to SEQ ID NO: 8091
  source 1..1977: mol_type = other DNA

SEQ ID NO: 8145 - DNA, 1980 bp, synthetic construct; identical to SEQ ID NO: 8092
  source 1..1980: mol_type = other DNA

SEQ ID NO: 8146 - DNA, 1983 bp, synthetic construct; identical to SEQ ID NO: 8093
  source 1..1983: mol_type = other DNA

SEQ ID NO: 8147 - DNA, 1986 bp, synthetic construct; identical to SEQ ID NO: 8094
  source 1..1986: mol_type = other DNA

SEQ ID NO: 8148 - DNA, 1986 bp, synthetic construct; identical to SEQ ID NO: 8095
  source 1..1986: mol_type = other DNA

SEQ ID NO: 8149 - DNA, 1971 bp, synthetic construct; identical to SEQ ID NO: 8089
  source 1..1971: mol_type = other DNA

SEQ ID NO: 8150 - DNA, 1971 bp, synthetic construct; identical to SEQ ID NO: 8097
  source 1..1971: mol_type = other DNA

SEQ ID NO: 8151 - DNA, 1971 bp, synthetic construct; identical to SEQ ID NO: 8098
  source 1..1971: mol_type = other DNA

SEQ ID NO: 8152 - DNA, 1971 bp, synthetic construct; identical to SEQ ID NO: 8099
  source 1..1971: mol_type = other DNA

SEQ ID NO: 8153 - DNA, 1971 bp, synthetic construct; identical to SEQ ID NO: 8100
  source 1..1971: mol_type = other DNA

SEQ ID NO: 8154 - DNA, 1971 bp, synthetic construct; identical to SEQ ID NO: 8101
  source 1..1971: mol_type = other DNA

SEQ ID NO: 8155 - DNA, 1983 bp, synthetic construct; identical to SEQ ID NO: 8050
  source 1..1983: mol_type = other DNA

SEQ ID NO: 8156 - DNA, 1983 bp, synthetic construct; identical to SEQ ID NO: 8049
  source 1..1983: mol_type = other DNA

SEQ ID NO: 8157 - DNA, 1980 bp, synthetic construct; identical to SEQ ID NO: 8048
  source 1..1980: mol_type = other DNA

SEQ ID NO: 8158 - DNA, 1977 bp, synthetic construct; identical to SEQ ID NO: 8047
  source 1..1977: mol_type = other DNA

SEQ ID NO: 8159 - DNA, 1974 bp, synthetic construct; identical to SEQ ID NO: 8046
  source 1..1974: mol_type = other DNA

SEQ ID NO: 8160 - DNA, 1971 bp, synthetic construct; identical to SEQ ID NO: 8045
  source 1..1971: mol_type = other DNA

SEQ ID NO: 8161 - DNA, 1968 bp, synthetic construct; identical to SEQ ID NO: 8044
  source 1..1968: mol_type = other DNA

SEQ ID NO: 8162 - DNA, 1965 bp, synthetic construct; identical to SEQ ID NO: 8043
  source 1..1965: mol_type = other DNA

SEQ ID NO: 8163 - DNA, 1962 bp, synthetic construct; identical to SEQ ID NO: 8042
  source 1..1962: mol_type = other DNA

SEQ ID NO: 8164 - DNA, 1959 bp, synthetic construct; identical to SEQ ID NO: 8132
  source 1..1959: mol_type = other DNA

SEQ ID NO: 8165 - DNA, 1959 bp, synthetic construct; identical to SEQ ID NO: 8060
  source 1..1959: mol_type = other DNA

SEQ ID NO: 8166 - DNA, 1959 bp, synthetic construct; identical to SEQ ID NO: 8061
  source 1..1959: mol_type = other DNA

SEQ ID NO: 8167 - DNA, 1959 bp, synthetic construct; identical to SEQ ID NO: 8062
  source 1..1959: mol_type = other DNA

SEQ ID NO: 8168 - DNA, 1959 bp, synthetic construct; identical to SEQ ID NO: 8063
  source 1..1959: mol_type = other DNA

SEQ ID NO: 8169 - DNA, 1959 bp, synthetic construct; identical to SEQ ID NO: 8064
  source 1..1959: mol_type = other DNA

SEQ ID NO: 8170 - DNA, 1959 bp, synthetic construct; identical to SEQ ID NO: 8065
  source 1..1959: mol_type = other DNA

SEQ ID NO: 8171 - DNA, 1959 bp, synthetic construct; identical to SEQ ID NO: 8066
  source 1..1959: mol_type = other DNA

SEQ ID NO: 8172 - DNA, 1959 bp, synthetic construct; identical to SEQ ID NO: 8067
  source 1..1959: mol_type = other DNA

SEQ ID NO: 8173 - DNA, 1959 bp, synthetic construct; identical to SEQ ID NO: 8070
  source 1..1959: mol_type = other DNA

SEQ ID NO: 8174 - DNA, 1959 bp, synthetic construct; identical to SEQ ID NO: 8071
  source 1..1959: mol_type = other DNA

SEQ ID NO: 8175 - DNA, 1959 bp, synthetic construct
  source 1..1959: mol_type = other DNA
atggccttaccagtgaccgccttgctcctgccgctggccttgctgctccacgccgccaggccggcatgccgcagcgagtaccgctaccgcggtaccggcggaggcggatctggcggcggaggtagcggtggcggaggatctgaattcgacatccagatgacacagagccctagcagcctgtctgccagcgtgggagacagagtgaccatcacatgcaaggccagcgaccacatcaacaactggctggcctggtatcagcagaagcctggacaggcccctaagctgctgatctacggcgctaccacactggaaacaggcgtgcccagcagattttctggcagcggctctggcaccgactacaccctgacaatatccagcctccagcctgaggacttcgccacctactactgtcagcagagctggaacaccccttggacattcggccagggcaccaagctggaaatcaagagactcgaggacctgaagaacgtgttcccacctgaggtggccgtgttcgagcctagcgaggccgagatcagccacacccagaaagccaccctcgtgtgcctggctaccggcttctaccccgaccatgtggaactgtcttggtgggtcaacggcaaagaggtgcacagcggcgtgtgtaccgacccccagccactgaaagaacagcccgccctgaacgacagccggtactgcctgagcagcagactgagagtgtccgccaccttctggcagaacccccggaaccacttcagatgccaggtgcagttctacggcctgagcgagaacgacgagtggacccaggacagagccaagcccgtgacccagatcgtgtctgccgaagcctggggcagagccgattgcggctttaccagcgagagctaccagcagggcgtgctgagcgccaccatcctgtacgagatcctgctgggcaaggccaccctgtacgccgtgctggtgtctgccctggtgctgatggctatggtcaagcggaaggacagccggggaagggccaagcgatctggatctggagcaacaaacttctcactactcaaacaagcaggtgacgtggaggagaatcccgggcctactagtgccaccatggactggatttggcgcatccttttccttgtcggcgctgctaccggcgcccattccttcgaacaagttcagcttcaacagcctggcgctgagctggtcaaacctggcgcttctgtgaagatgagctgcaaagccagcggctacgccttcagcagctactggatcaactggatgaagcagaaacccggccagggactcgaatggatcggccaaatctatcccggcgacggcgacaccaactacaacggcaagttcaagggcagagccacactgaccgccgatacctctagcagcacagcctacatgcagctgagcagcctgaccagcgaagatagcgccgtgtacttctgtgcccggtccatcacaacagtcgtgggctgcgctatggactattggggccagggaacaagcgtgaccgtgtctagtacgcgtatccagaaccctgatcctgccgtgtaccagctgcgggatagcaagagcagcgacaagagcgtgtgtctgttcaccgacttcgacagccagaccaacgtgtcccagagcaaggactccgacgtgtacatcaccgataagtgcgtgctggacatgcggagcatggacttcaagagcaactccgccgtggcctggtccaacaagtccgatttcgcctgcgccaacgccttcaacaacagcattatccccgaggacacattcttcccaagccccgagagcagctgcgacgtgaagctggtggaaaagagcttcgagacagacaccaacctgaacttccagaacctgagcgtgatcggcttcagaatcctgctgctgaaagtggccggctttaacctgctgatgaccctgcggctgtggtccagctaa

SEQ ID NO: 8176 - DNA, 1959 bp, synthetic construct
  source 1..1959: mol_type = other DNA
atggccttaccagtgaccgccttgctcctgccgctggccttgctgctccacgccgccaggccggcatgccgcagcgagtggcgctaccgcggtaccggcggaggcggatctggcggcggaggtagcggtggcggaggatctgaattcgacatccagatgacacagagccctagcagcctgtctgccagcgtgggagacagagtgaccatcacatgcaaggccagcgaccacatcaacaactggctggcctggtatcagcagaagcctggacaggcccctaagctgctgatctacggcgctaccacactggaaacaggcgtgcccagcagattttctggcagcggctctggcaccgactacaccctgacaatatccagcctccagcctgaggacttcgccacctactactgtcagcagagctggaacaccccttggacattcggccagggcaccaagctggaaatcaagagactcgaggacctgaagaacgtgttcccacctgaggtggccgtgttcgagcctagcgaggccgagatcagccacacccagaaagccaccctcgtgtgcctggctaccggcttctaccccgaccatgtggaactgtcttggtgggtcaacggcaaagaggtgcacagcggcgtgtgtaccgacccccagccactgaaagaacagcccgccctgaacgacagccggtactgcctgagcagcagactgagagtgtccgccaccttctggcagaacccccggaaccacttcagatgccaggtgcagttctacggcctgagcgagaacgacgagtggacccaggacagagccaagcccgtgacccagatcgtgtctgccgaagcctggggcagagccgattgcggctttaccagcgagagctaccagcagggcgtgctgagcgccaccatcctgtacgagatcctgctgggcaaggccaccctgtacgccgtgctggtgtctgccctggtgctgatggctatggtcaagcggaaggacagccggggaagggccaagcgatctggatctggagcaacaaacttctcactactcaaacaagcaggtgacgtggaggagaatcccgggcctactagtgccaccatggactggatttggcgcatccttttccttgtcggcgctgctaccggcgcccattccttcgaacaagttcagcttcaacagcctggcgctgagctggtcaaacctggcgcttctgtgaagatgagctgcaaagccagcggctacgccttcagcagctactggatcaactggatgaagcagaaacccggccagggactcgaatggatcggccaaatctatcccggcgacggcgacaccaactacaacggcaagttcaagggcagagccacactgaccgccgatacctctagcagcacagcctacatgcagctgagcagcctgaccagcgaagatagcgccgtgtacttctgtgcccggtccatcacaacagtcgtgggctgcgctatggactattggggccagggaacaagcgtgaccgtgtctagtacgcgtatccagaaccctgatcctgccgtgtaccagctgcgggatagcaagagcagcgacaagagcgtgtgtctgttcaccgacttcgacagccagaccaacgtgtcccagagcaaggactccgacgtgtacatcaccgataagtgcgtgctggacatgcggagcatggacttcaagagcaactccgccgtggcctggtccaacaagtccgatttcgcctgcgccaacgccttcaacaacagcattatccccgaggacacattcttcccaagccccgagagcagctgcgacgtgaagctggtggaaaagagcttcgagacagacaccaacctgaacttccagaacctgagcgtgatcggcttcagaatcctgctgctgaaagtggccggctttaacctgctgatgaccctgcggctgtggtccagctaa

SEQ ID NO: 8177 - DNA, 1959 bp, synthetic construct
  source 1..1959: mol_type = other DNA
atggccttaccagtgaccgccttgctcctgccgctggccttgctgctccacgccgccaggccggcatgccgcagcgagcgccgctaccgcggtaccggcggaggcggatctggcggcggaggtagcggtggcggaggatctgaattcgacatccagatgacacagagccctagcagcctgtctgccagcgtgggagacagagtgaccatcacatgcaaggccagcgaccacatcaacaactggctggcctggtatcagcagaagcctggacaggcccctaagctgctgatctacggcgctaccacactggaaacaggcgtgcccagcagattttctggcagcggctctggcaccgactacaccctgacaatatccagcctccagcctgaggacttcgccacctactactgtcagcagagctggaacaccccttggacattcggccagggcaccaagctggaaatcaagagactcgaggacctgaagaacgtgttcccacctgaggtggccgtgttcgagcctagcgaggccgagatcagccacacccagaaagccaccctcgtgtgcctggctaccggcttctaccccgaccatgtggaactgtcttggtgggtcaacggcaaagaggtgcacagcggcgtgtgtaccgacccccagccactgaaagaacagcccgccctgaacgacagccggtactgcctgagcagcagactgagagtgtccgccaccttctggcagaacccccggaaccacttcagatgccaggtgcagttctacggcctgagcgagaacgacgagtggacccaggacagagccaagcccgtgacccagatcgtgtctgccgaagcctggggcagagccgattgcggctttaccagcgagagctaccagcagggcgtgctgagcgccaccatcctgtacgagatcctgctgggcaaggccaccctgtacgccgtgctggtgtctgccctggtgctgatggctatggtcaagcggaaggacagccggggaagggccaagcgatctggatctggagcaacaaacttctcactactcaaacaagcaggtgacgtggaggagaatcccgggcctactagtgccaccatggactggatttggcgcatccttttccttgtcggcgctgctaccggcgcccattccttcgaacaagttcagcttcaacagcctggcgctgagctggtcaaacctggcgcttctgtgaagatgagctgcaaagccagcggctacgccttcagcagctactggatcaactggatgaagcagaaacccggccagggactcgaatggatcggccaaatctatcccggcgacggcgacaccaactacaacggcaagttcaagggcagagccacactgaccgccgatacctctagcagcacagcctacatgcagctgagcagcctgaccagcgaagatagcgccgtgtacttctgtgcccggtccatcacaacagtcgtgggctgcgctatggactattggggccagggaacaagcgtgaccgtgtctagtacgcgtatccagaaccctgatcctgccgtgtaccagctgcgggatagcaagagcagcgacaagagcgtgtgtctgttcaccgacttcgacagccagaccaacgtgtcccagagcaaggactccgacgtgtacatcaccgataagtgcgtgctggacatgcggagcatggacttcaagagcaactccgccgtggcctggtccaacaagtccgatttcgcctgcgccaacgccttcaacaacagcattatccccgaggacacattcttcccaagccccgagagcagctgcgacgtgaagctggtggaaaagagcttcgagacagacaccaacctgaacttccagaacctgagcgtgatcggcttcagaatcctgctgctgaaagtggccggctttaacctgctgatgaccctgcggctgtggtccagctaa

SEQ ID NO: 8178 - DNA, 1959 bp, synthetic construct
  source 1..1959: mol_type = other DNA
atggccttaccagtgaccgccttgctcctgccgctggccttgctgctccacgccgccaggccggcatgccgcagcgaggtgcgctaccgcggtaccggcggaggcggatctggcggcggaggtagcggtggcggaggatctgaattcgacatccagatgacacagagccctagcagcctgtctgccagcgtgggagacagagtgaccatcacatgcaaggccagcgaccacatcaacaactggctggcctggtatcagcagaagcctggacaggcccctaagctgctgatctacggcgctaccacactggaaacaggcgtgcccagcagattttctggcagcggctctggcaccgactacaccctgacaatatccagcctccagcctgaggacttcgccacctactactgtcagcagagctggaacaccccttggacattcggccagggcaccaagctggaaatcaagagactcgaggacctgaagaacgtgttcccacctgaggtggccgtgttcgagcctagcgaggccgagatcagccacacccagaaagccaccctcgtgtgcctggctaccggcttctaccccgaccatgtggaactgtcttggtgggtcaacggcaaagaggtgcacagcggcgtgtgtaccgacccccagccactgaaagaacagcccgccctgaacgacagccggtactgcctgagcagcagactgagagtgtccgccaccttctggcagaacccccggaaccacttcagatgccaggtgcagttctacggcctgagcgagaacgacgagtggacccaggacagagccaagcccgtgacccagatcgtgtctgccgaagcctggggcagagccgattgcggctttaccagcgagagctaccagcagggcgtgctgagcgccaccatcctgtacgagatcctgctgggcaaggccaccctgtacgccgtgctggtgtctgccctggtgctgatggctatggtcaagcggaaggacagccggggaagggccaagcgatctggatctggagcaacaaacttctcactactcaaacaagcaggtgacgtggaggagaatcccgggcctactagtgccaccatggactggatttggcgcatccttttccttgtcggcgctgctaccggcgcccattccttcgaacaagttcagcttcaacagcctggcgctgagctggtcaaacctggcgcttctgtgaagatgagctgcaaagccagcggctacgccttcagcagctactggatcaactggatgaagcagaaacccggccagggactcgaatggatcggccaaatctatcccggcgacggcgacaccaactacaacggcaagttcaagggcagagccacactgaccgccgatacctctagcagcacagcctacatgcagctgagcagcctgaccagcgaagatagcgccgtgtacttctgtgcccggtccatcacaacagtcgtgggctgcgctatggactattggggccagggaacaagcgtgaccgtgtctagtacgcgtatccagaaccctgatcctgccgtgtaccagctgcgggatagcaagagcagcgacaagagcgtgtgtctgttcaccgacttcgacagccagaccaacgtgtcccagagcaaggactccgacgtgtacatcaccgataagtgcgtgctggacatgcggagcatggacttcaagagcaactccgccgtggcctggtccaacaagtccgatttcgcctgcgccaacgccttcaacaacagcattatccccgaggacacattcttcccaagccccgagagcagctgcgacgtgaagctggtggaaaagagcttcgagacagacaccaacctgaacttccagaacctgagcgtgatcggcttcagaatcctgctgctgaaagtggccggctttaacctgctgatgaccctgcggctgtggtccagctaa

SEQ ID NO: 8179 - DNA, 1959 bp, synthetic construct
  source 1..1959: mol_type = other DNA
atggccttaccagtgaccgccttgctcctgccgctggccttgctgctccacgccgccaggccggcatgccgcatcgaggaccgctaccgcggtaccggcggaggcggatctggcggcggaggtagcggtggcggaggatctgaattcgacatccagatgacacagagccctagcagcctgtctgccagcgtgggagacagagtgaccatcacatgcaaggccagcgaccacatcaacaactggctggcctggtatcagcagaagcctggacaggcccctaagctgctgatctacggcgctaccacactggaaacaggcgtgcccagcagattttctggcagcggctctggcaccgactacaccctgacaatatccagcctccagcctgaggacttcgccacctactactgtcagcagagctggaacaccccttggacattcggccagggcaccaagctggaaatcaagagactcgaggacctgaagaacgtgttcccacctgaggtggccgtgttcgagcctagcgaggccgagatcagccacacccagaaagccaccctcgtgtgcctggctaccggcttctaccccgaccatgtggaactgtcttggtgggtcaacggcaaagaggtgcacagcggcgtgtgtaccgacccccagccactgaaagaacagcccgccctgaacgacagccggtactgcctgagcagcagactgagagtgtccgccaccttctggcagaacccccggaaccacttcagatgccaggtgcagttctacggcctgagcgagaacgacgagtggacccaggacagagccaagcccgtgacccagatcgtgtctgccgaagcctggggcagagccgattgcggctttaccagcgagagctaccagcagggcgtgctgagcgccaccatcctgtacgagatcctgctgggcaaggccaccctgtacgccgtgctggtgtctgccctggtgctgatggctatggtcaagcggaaggacagccggggaagggccaagcgatctggatctggagcaacaaacttctcactactcaaacaagcaggtgacgtggaggagaatcccgggcctactagtgccaccatggactggatttggcgcatccttttccttgtcggcgctgctaccggcgcccattccttcgaacaagttcagcttcaacagcctggcgctgagctggtcaaacctggcgcttctgtgaagatgagctgcaaagccagcggctacgccttcagcagctactggatcaactggatgaagcagaaacccggccagggactcgaatggatcggccaaatctatcccggcgacggcgacaccaactacaacggcaagttcaagggcagagccacactgaccgccgatacctctagcagcacagcctacatgcagctgagcagcctgaccagcgaagatagcgccgtgtacttctgtgcccggtccatcacaacagtcgtgggctgcgctatggactattggggccagggaacaagcgtgaccgtgtctagtacgcgtatccagaaccctgatcctgccgtgtaccagctgcgggatagcaagagcagcgacaagagcgtgtgtctgttcaccgacttcgacagccagaccaacgtgtcccagagcaaggactccgacgtgtacatcaccgataagtgcgtgctggacatgcggagcatggacttcaagagcaactccgccgtggcctggtccaacaagtccgatttcgcctgcgccaacgccttcaacaacagcattatccccgaggacacattcttcccaagccccgagagcagctgcgacgtgaagctggtggaaaagagcttcgagacagacaccaacctgaacttccagaacctgagcgtgatcggcttcagaatcctgctgctgaaagtggccggctttaacctgctgatgaccctgcggctgtggtccagctaa

SEQ ID NO: 8180 - DNA, 1959 bp, synthetic construct
  source 1..1959: mol_type = other DNA
atggccttaccagtgaccgccttgctcctgccgctggccttgctgctccacgccgccaggccggcatgccgcctggaggaccgctaccgcggtaccggcggaggcggatctggcggcggaggtagcggtggcggaggatctgaattcgacatccagatgacacagagccctagcagcctgtctgccagcgtgggagacagagtgaccatcacatgcaaggccagcgaccacatcaacaactggctggcctggtatcagcagaagcctggacaggcccctaagctgctgatctacggcgctaccacactggaaacaggcgtgcccagcagattttctggcagcggctctggcaccgactacaccctgacaatatccagcctccagcctgaggacttcgccacctactactgtcagcagagctggaacaccccttggacattcggccagggcaccaagctggaaatcaagagactcgaggacctgaagaacgtgttcccacctgaggtggccgtgttcgagcctagcgaggccgagatcagccacacccagaaagccaccctcgtgtgcctggctaccggcttctaccccgaccatgtggaactgtcttggtgggtcaacggcaaagaggtgcacagcggcgtgtgtaccgacccccagccactgaaagaacagcccgccctgaacgacagccggtactgcctgagcagcagactgagagtgtccgccaccttctggcagaacccccggaaccacttcagatgccaggtgcagttctacggcctgagcgagaacgacgagtggacccaggacagagccaagcccgtgacccagatcgtgtctgccgaagcctggggcagagccgattgcggctttaccagcgagagctaccagcagggcgtgctgagcgccaccatcctgtacgagatcctgctgggcaaggccaccctgtacgccgtgctggtgtctgccctggtgctgatggctatggtcaagcggaaggacagccggggaagggccaagcgatctggatctggagcaacaaacttctcactactcaaacaagcaggtgacgtggaggagaatcccgggcctactagtgccaccatggactggatttggcgcatccttttccttgtcggcgctgctaccggcgcccattccttcgaacaagttcagcttcaacagcctggcgctgagctggtcaaacctggcgcttctgtgaagatgagctgcaaagccagcggctacgccttcagcagctactggatcaactggatgaagcagaaacccggccagggactcgaatggatcggccaaatctatcccggcgacggcgacaccaactacaacggcaagttcaagggcagagccacactgaccgccgatacctctagcagcacagcctacatgcagctgagcagcctgaccagcgaagatagcgccgtgtacttctgtgcccggtccatcacaacagtcgtgggctgcgctatggactattggggccagggaacaagcgtgaccgtgtctagtacgcgtatccagaaccctgatcctgccgtgtaccagctgcgggatagcaagagcagcgacaagagcgtgtgtctgttcaccgacttcgacagccagaccaacgtgtcccagagcaaggactccgacgtgtacatcaccgataagtgcgtgctggacatgcggagcatggacttcaagagcaactccgccgtggcctggtccaacaagtccgatttcgcctgcgccaacgccttcaacaacagcattatccccgaggacacattcttcccaagccccgagagcagctgcgacgtgaagctggtggaaaagagcttcgagacagacaccaacctgaacttccagaacctgagcgtgatcggcttcagaatcctgctgctgaaagtggccggctttaacctgctgatgaccctgcggctgtggtccagctaa

SEQ ID NO: 8181 - DNA, 1959 bp, synthetic construct
  source 1..1959: mol_type = other DNA
atggccttaccagtgaccgccttgctcctgccgctggccttgctgctccacgccgccaggccggcatgccgcatggaggaccgctaccgcggtaccggcggaggcggatctggcggcggaggtagcggtggcggaggatctgaattcgacatccagatgacacagagccctagcagcctgtctgccagcgtgggagacagagtgaccatcacatgcaaggccagcgaccacatcaacaactggctggcctggtatcagcagaagcctggacaggcccctaagctgctgatctacggcgctaccacactggaaacaggcgtgcccagcagattttctggcagcggctctggcaccgactacaccctgacaatatccagcctccagcctgaggacttcgccacctactactgtcagcagagctggaacaccccttggacattcggccagggcaccaagctggaaatcaagagactcgaggacctgaagaacgtgttcccacctgaggtggccgtgttcgagcctagcgaggccgagatcagccacacccagaaagccaccctcgtgtgcctggctaccggcttctaccccgaccatgtggaactgtcttggtgggtcaacggcaaagaggtgcacagcggcgtgtgtaccgacccccagccactgaaagaacagcccgccctgaacgacagccggtactgcctgagcagcagactgagagtgtccgccaccttctggcagaacccccggaaccacttcagatgccaggtgcagttctacggcctgagcgagaacgacgagtggacccaggacagagccaagcccgtgacccagatcgtgtctgccgaagcctggggcagagccgattgcggctttaccagcgagagctaccagcagggcgtgctgagcgccaccatcctgtacgagatcctgctgggcaaggccaccctgtacgccgtgctggtgtctgccctggtgctgatggctatggtcaagcggaaggacagccggggaagggccaagcgatctggatctggagcaacaaacttctcactactcaaacaagcaggtgacgtggaggagaatcccgggcctactagtgccaccatggactggatttggcgcatccttttccttgtcggcgctgctaccggcgcccattccttcgaacaagttcagcttcaacagcctggcgctgagctggtcaaacctggcgcttctgtgaagatgagctgcaaagccagcggctacgccttcagcagctactggatcaactggatgaagcagaaacccggccagggactcgaatggatcggccaaatctatcccggcgacggcgacaccaactacaacggcaagttcaagggcagagccacactgaccgccgatacctctagcagcacagcctacatgcagctgagcagcctgaccagcgaagatagcgccgtgtacttctgtgcccggtccatcacaacagtcgtgggctgcgctatggactattggggccagggaacaagcgtgaccgtgtctagtacgcgtatccagaaccctgatcctgccgtgtaccagctgcgggatagcaagagcagcgacaagagcgtgtgtctgttcaccgacttcgacagccagaccaacgtgtcccagagcaaggactccgacgtgtacatcaccgataagtgcgtgctggacatgcggagcatggacttcaagagcaactccgccgtggcctggtccaacaagtccgatttcgcctgcgccaacgccttcaacaacagcattatccccgaggacacattcttcccaagccccgagagcagctgcgacgtgaagctggtggaaaagagcttcgagacagacaccaacctgaacttccagaacctgagcgtgatcggcttcagaatcctgctgctgaaagtggccggctttaacctgctgatgaccctgcggctgtggtccagctaa

SEQ ID NO: 8182 - DNA, 1959 bp, synthetic construct
  source 1..1959: mol_type = other DNA
atggccttaccagtgaccgccttgctcctgccgctggccttgctgctccacgccgccaggccggcatgccgcgtggaggaccgctaccgcggtaccggcggaggcggatctggcggcggaggtagcggtggcggaggatctgaattcgacatccagatgacacagagccctagcagcctgtctgccagcgtgggagacagagtgaccatcacatgcaaggccagcgaccacatcaacaactggctggcctggtatcagcagaagcctggacaggcccctaagctgctgatctacggcgctaccacactggaaacaggcgtgcccagcagattttctggcagcggctctggcaccgactacaccctgacaatatccagcctccagcctgaggacttcgccacctactactgtcagcagagctggaacaccccttggacattcggccagggcaccaagctggaaatcaagagactcgaggacctgaagaacgtgttcccacctgaggtggccgtgttcgagcctagcgaggccgagatcagccacacccagaaagccaccctcgtgtgcctggctaccggcttctaccccgaccatgtggaactgtcttggtgggtcaacggcaaagaggtgcacagcggcgtgtgtaccgacccccagccactgaaagaacagcccgccctgaacgacagccggtactgcctgagcagcagactgagagtgtccgccaccttctggcagaacccccggaaccacttcagatgccaggtgcagttctacggcctgagcgagaacgacgagtggacccaggacagagccaagcccgtgacccagatcgtgtctgccgaagcctggggcagagccgattgcggctttaccagcgagagctaccagcagggcgtgctgagcgccaccatcctgtacgagatcctgctgggcaaggccaccctgtacgccgtgctggtgtctgccctggtgctgatggctatggtcaagcggaaggacagccggggaagggccaagcgatctggatctggagcaacaaacttctcactactcaaacaagcaggtgacgtggaggagaatcccgggcctactagtgccaccatggactggatttggcgcatccttttccttgtcggcgctgctaccggcgcccattccttcgaacaagttcagcttcaacagcctggcgctgagctggtcaaacctggcgcttctgtgaagatgagctgcaaagccagcggctacgccttcagcagctactggatcaactggatgaagcagaaacccggccagggactcgaatggatcggccaaatctatcccggcgacggcgacaccaactacaacggcaagttcaagggcagagccacactgaccgccgatacctctagcagcacagcctacatgcagctgagcagcctgaccagcgaagatagcgccgtgtacttctgtgcccggtccatcacaacagtcgtgggctgcgctatggactattggggccagggaacaagcgtgaccgtgtctagtacgcgtatccagaaccctgatcctgccgtgtaccagctgcgggatagcaagagcagcgacaagagcgtgtgtctgttcaccgacttcgacagccagaccaacgtgtcccagagcaaggactccgacgtgtacatcaccgataagtgcgtgctggacatgcggagcatggacttcaagagcaactccgccgtggcctggtccaacaagtccgatttcgcctgcgccaacgccttcaacaacagcattatccccgaggacacattcttcccaagccccgagagcagctgcgacgtgaagctggtggaaaagagcttcgagacagacaccaacctgaacttccagaacctgagcgtgatcggcttcagaatcctgctgctgaaagtggccggctttaacctgctgatgaccctgcggctgtggtccagctaa

SEQ ID NO: 8183 - DNA, 1959 bp, synthetic construct
  source 1..1959: mol_type = other DNA
atggccttaccagtgaccgccttgctcctgccgctggccttgctgctccacgccgccaggccggcatgccgcgccgaggaccgctaccgcggtaccggcggaggcggatctggcggcggaggtagcggtggcggaggatctgaattcgacatccagatgacacagagccctagcagcctgtctgccagcgtgggagacagagtgaccatcacatgcaaggccagcgaccacatcaacaactggctggcctggtatcagcagaagcctggacaggcccctaagctgctgatctacggcgctaccacactggaaacaggcgtgcccagcagattttctggcagcggctctggcaccgactacaccctgacaatatccagcctccagcctgaggacttcgccacctactactgtcagcagagctggaacaccccttggacattcggccagggcaccaagctggaaatcaagagactcgaggacctgaagaacgtgttcccacctgaggtggccgtgttcgagcctagcgaggccgagatcagccacacccagaaagccaccctcgtgtgcctggctaccggcttctaccccgaccatgtggaactgtcttggtgggtcaacggcaaagaggtgcacagcggcgtgtgtaccgacccccagccactgaaagaacagcccgccctgaacgacagccggtactgcctgagcagcagactgagagtgtccgccaccttctggcagaacccccggaaccacttcagatgccaggtgcagttctacggcctgagcgagaacgacgagtggacccaggacagagccaagcccgtgacccagatcgtgtctgccgaagcctggggcagagccgattgcggctttaccagcgagagctaccagcagggcgtgctgagcgccaccatcctgtacgagatcctgctgggcaaggccaccctgtacgccgtgctggtgtctgccctggtgctgatggctatggtcaagcggaaggacagccggggaagggccaagcgatctggatctggagcaacaaacttctcactactcaaacaagcaggtgacgtggaggagaatcccgggcctactagtgccaccatggactggatttggcgcatccttttccttgtcggcgctgctaccggcgcccattccttcgaacaagttcagcttcaacagcctggcgctgagctggtcaaacctggcgcttctgtgaagatgagctgcaaagccagcggctacgccttcagcagctactggatcaactggatgaagcagaaacccggccagggactcgaatggatcggccaaatctatcccggcgacggcgacaccaactacaacggcaagttcaagggcagagccacactgaccgccgatacctctagcagcacagcctacatgcagctgagcagcctgaccagcgaagatagcgccgtgtacttctgtgcccggtccatcacaacagtcgtgggctgcgctatggactattggggccagggaacaagcgtgaccgtgtctagtacgcgtatccagaaccctgatcctgccgtgtaccagctgcgggatagcaagagcagcgacaagagcgtgtgtctgttcaccgacttcgacagccagaccaacgtgtcccagagcaaggactccgacgtgtacatcaccgataagtgcgtgctggacatgcggagcatggacttcaagagcaactccgccgtggcctggtccaacaagtccgatttcgcctgcgccaacgccttcaacaacagcattatccccgaggacacattcttcccaagccccgagagcagctgcgacgtgaagctggtggaaaagagcttcgagacagacaccaacctgaacttccagaacctgagcgtgatcggcttcagaatcctgctgctgaaagtggccggctttaacctgctgatgaccctgcggctgtggtccagctaa

SEQ ID NO: 8184 - DNA, 1959 bp, synthetic construct
  source 1..1959: mol_type = other DNA
atggccttaccagtgaccgccttgctcctgccgctggccttgctgctccacgccgccaggccggcatgccgcttcgaggaccgctaccgcggtaccggcggaggcggatctggcggcggaggtagcggtggcggaggatctgaattcgacatccagatgacacagagccctagcagcctgtctgccagcgtgggagacagagtgaccatcacatgcaaggccagcgaccacatcaacaactggctggcctggtatcagcagaagcctggacaggcccctaagctgctgatctacggcgctaccacactggaaacaggcgtgcccagcagattttctggcagcggctctggcaccgactacaccctgacaatatccagcctccagcctgaggacttcgccacctactactgtcagcagagctggaacaccccttggacattcggccagggcaccaagctggaaatcaagagactcgaggacctgaagaacgtgttcccacctgaggtggccgtgttcgagcctagcgaggccgagatcagccacacccagaaagccaccctcgtgtgcctggctaccggcttctaccccgaccatgtggaactgtcttggtgggtcaacggcaaagaggtgcacagcggcgtgtgtaccgacccccagccactgaaagaacagcccgccctgaacgacagccggtactgcctgagcagcagactgagagtgtccgccaccttctggcagaacccccggaaccacttcagatgccaggtgcagttctacggcctgagcgagaacgacgagtggacccaggacagagccaagcccgtgacccagatcgtgtctgccgaagcctggggcagagccgattgcggctttaccagcgagagctaccagcagggcgtgctgagcgccaccatcctgtacgagatcctgctgggcaaggccaccctgtacgccgtgctggtgtctgccctggtgctgatggctatggtcaagcggaaggacagccggggaagggccaagcgatctggatctggagcaacaaacttctcactactcaaacaagcaggtgacgtggaggagaatcccgggcctactagtgccaccatggactggatttggcgcatccttttccttgtcggcgctgctaccggcgcccattccttcgaacaagttcagcttcaacagcctggcgctgagctggtcaaacctggcgcttctgtgaagatgagctgcaaagccagcggctacgccttcagcagctactggatcaactggatgaagcagaaacccggccagggactcgaatggatcggccaaatctatcccggcgacggcgacaccaactacaacggcaagttcaagggcagagccacactgaccgccgatacctctagcagcacagcctacatgcagctgagcagcctgaccagcgaagatagcgccgtgtacttctgtgcccggtccatcacaacagtcgtgggctgcgctatggactattggggccagggaacaagcgtgaccgtgtctagtacgcgtatccagaaccctgatcctgccgtgtaccagctgcgggatagcaagagcagcgacaagagcgtgtgtctgttcaccgacttcgacagccagaccaacgtgtcccagagcaaggactccgacgtgtacatcaccgataagtgcgtgctggacatgcggagcatggacttcaagagcaactccgccgtggcctggtccaacaagtccgatttcgcctgcgccaacgccttcaacaacagcattatccccgaggacacattcttcccaagccccgagagcagctgcgacgtgaagctggtggaaaagagcttcgagacagacaccaacctgaacttccagaacctgagcgtgatcggcttcagaatcctgctgctgaaagtggccggctttaacctgctgatgaccctgcggctgtggtccagctaa

SEQ ID NO: 8185 - DNA, 1959 bp, synthetic construct
  source 1..1959: mol_type = other DNA
atggccttaccagtgaccgccttgctcctgccgctggccttgctgctccacgccgccaggccggcatgccgccacgaggaccgctaccgcggtaccggcggaggcggatctggcggcggaggtagcggtggcggaggatctgaattcgacatccagatgacacagagccctagcagcctgtctgccagcgtgggagacagagtgaccatcacatgcaaggccagcgaccacatcaacaactggctggcctggtatcagcagaagcctggacaggcccctaagctgctgatctacggcgctaccacactggaaacaggcgtgcccagcagattttctggcagcggctctggcaccgactacaccctgacaatatccagcctccagcctgaggacttcgccacctactactgtcagcagagctggaacaccccttggacattcggccagggcaccaagctggaaatcaagagactcgaggacctgaagaacgtgttcccacctgaggtggccgtgttcgagcctagcgaggccgagatcagccacacccagaaagccaccctcgtgtgcctggctaccggcttctaccccgaccatgtggaactgtcttggtgggtcaacggcaaagaggtgcacagcggcgtgtgtaccgacccccagccactgaaagaacagcccgccctgaacgacagccggtactgcctgagcagcagactgagagtgtccgccaccttctggcagaacccccggaaccacttcagatgccaggtgcagttctacggcctgagcgagaacgacgagtggacccaggacagagccaagcccgtgacccagatcgtgtctgccgaagcctggggcagagccgattgcggctttaccagcgagagctaccagcagggcgtgctgagcgccaccatcctgtacgagatcctgctgggcaaggccaccctgtacgccgtgctggtgtctgccctggtgctgatggctatggtcaagcggaaggacagccggggaagggccaagcgatctggatctggagcaacaaacttctcactactcaaacaagcaggtgacgtggaggagaatcccgggcctactagtgccaccatggactggatttggcgcatccttttccttgtcggcgctgctaccggcgcccattccttcgaacaagttcagcttcaacagcctggcgctgagctggtcaaacctggcgcttctgtgaagatgagctgcaaagccagcggctacgccttcagcagctactggatcaactggatgaagcagaaacccggccagggactcgaatggatcggccaaatctatcccggcgacggcgacaccaactacaacggcaagttcaagggcagagccacactgaccgccgatacctctagcagcacagcctacatgcagctgagcagcctgaccagcgaagatagcgccgtgtacttctgtgcccggtccatcacaacagtcgtgggctgcgctatggactattggggccagggaacaagcgtgaccgtgtctagtacgcgtatccagaaccctgatcctgccgtgtaccagctgcgggatagcaagagcagcgacaagagcgtgtgtctgttcaccgacttcgacagccagaccaacgtgtcccagagcaaggactccgacgtgtacatcaccgataagtgcgtgctggacatgcggagcatggacttcaagagcaactccgccgtggcctggtccaacaagtccgatttcgcctgcgccaacgccttcaacaacagcattatccccgaggacacattcttcccaagccccgagagcagctgcgacgtgaagctggtggaaaagagcttcgagacagacaccaacctgaacttccagaacctgagcgtgatcggcttcagaatcctgctgctgaaagtggccggctttaacctgctgatgaccctgcggctgtggtccagctaa

SEQ ID NO: 8186 - DNA, 1959 bp, synthetic construct
  source 1..1959: mol_type = other DNA
atggccttaccagtgaccgccttgctcctgccgctggccttgctgctccacgccgccaggccggcatgccgcggcgaggaccgctaccgcggtaccggcggaggcggatctggcggcggaggtagcggtggcggaggatctgaattcgacatccagatgacacagagccctagcagcctgtctgccagcgtgggagacagagtgaccatcacatgcaaggccagcgaccacatcaacaactggctggcctggtatcagcagaagcctggacaggcccctaagctgctgatctacggcgctaccacactggaaacaggcgtgcccagcagattttctggcagcggctctggcaccgactacaccctgacaatatccagcctccagcctgaggacttcgccacctactactgtcagcagagctggaacaccccttggacattcggccagggcaccaagctggaaatcaagagactcgaggacctgaagaacgtgttcccacctgaggtggccgtgttcgagcctagcgaggccgagatcagccacacccagaaagccaccctcgtgtgcctggctaccggcttctaccccgaccatgtggaactgtcttggtgggtcaacggcaaagaggtgcacagcggcgtgtgtaccgacccccagccactgaaagaacagcccgccctgaacgacagccggtactgcctgagcagcagactgagagtgtccgccaccttctggcagaacccccggaaccacttcagatgccaggtgcagttctacggcctgagcgagaacgacgagtggacccaggacagagccaagcccgtgacccagatcgtgtctgccgaagcctggggcagagccgattgcggctttaccagcgagagctaccagcagggcgtgctgagcgccaccatcctgtacgagatcctgctgggcaaggccaccctgtacgccgtgctggtgtctgccctggtgctgatggctatggtcaagcggaaggacagccggggaagggccaagcgatctggatctggagcaacaaacttctcactactcaaacaagcaggtgacgtggaggagaatcccgggcctactagtgccaccatggactggatttggcgcatccttttccttgtcggcgctgctaccggcgcccattccttcgaacaagttcagcttcaacagcctggcgctgagctggtcaaacctggcgcttctgtgaagatgagctgcaaagccagcggctacgccttcagcagctactggatcaactggatgaagcagaaacccggccagggactcgaatggatcggccaaatctatcccggcgacggcgacaccaactacaacggcaagttcaagggcagagccacactgaccgccgatacctctagcagcacagcctacatgcagctgagcagcctgaccagcgaagatagcgccgtgtacttctgtgcccggtccatcacaacagtcgtgggctgcgctatggactattggggccagggaacaagcgtgaccgtgtctagtacgcgtatccagaaccctgatcctgccgtgtaccagctgcgggatagcaagagcagcgacaagagcgtgtgtctgttcaccgacttcgacagccagaccaacgtgtcccagagcaaggactccgacgtgtacatcaccgataagtgcgtgctggacatgcggagcatggacttcaagagcaactccgccgtggcctggtccaacaagtccgatttcgcctgcgccaacgccttcaacaacagcattatccccgaggacacattcttcccaagccccgagagcagctgcgacgtgaagctggtggaaaagagcttcgagacagacaccaacctgaacttccagaacctgagcgtgatcggcttcagaatcctgctgctgaaagtggccggctttaacctgctgatgaccctgcggctgtggtccagctaa

SEQ ID NO: 8187 - DNA, 1959 bp, synthetic construct
  source 1..1959: mol_type = other DNA
atggccttaccagtgaccgccttgctcctgccgctggccttgctgctccacgccgccaggccggcatgccgcaccgaggaccgctaccgcggtaccggcggaggcggatctggcggcggaggtagcggtggcggaggatctgaattcgacatccagatgacacagagccctagcagcctgtctgccagcgtgggagacagagtgaccatcacatgcaaggccagcgaccacatcaacaactggctggcctggtatcagcagaagcctggacaggcccctaagctgctgatctacggcgctaccacactggaaacaggcgtgcccagcagattttctggcagcggctctggcaccgactacaccctgacaatatccagcctccagcctgaggacttcgccacctactactgtcagcagagctggaacaccccttggacattcggccagggcaccaagctggaaatcaagagactcgaggacctgaagaacgtgttcccacctgaggtggccgtgttcgagcctagcgaggccgagatcagccacacccagaaagccaccctcgtgtgcctggctaccggcttctaccccgaccatgtggaactgtcttggtgggtcaacggcaaagaggtgcacagcggcgtgtgtaccgacccccagccactgaaagaacagcccgccctgaacgacagccggtactgcctgagcagcagactgagagtgtccgccaccttctggcagaacccccggaaccacttcagatgccaggtgcagttctacggcctgagcgagaacgacgagtggacccaggacagagccaagcccgtgacccagatcgtgtctgccgaagcctggggcagagccgattgcggctttaccagcgagagctaccagcagggcgtgctgagcgccaccatcctgtacgagatcctgctgggcaaggccaccctgtacgccgtgctggtgtctgccctggtgctgatggctatggtcaagcggaaggacagccggggaagggccaagcgatctggatctggagcaacaaacttctcactactcaaacaagcaggtgacgtggaggagaatcccgggcctactagtgccaccatggactggatttggcgcatccttttccttgtcggcgctgctaccggcgcccattccttcgaacaagttcagcttcaacagcctggcgctgagctggtcaaacctggcgcttctgtgaagatgagctgcaaagccagcggctacgccttcagcagctactggatcaactggatgaagcagaaacccggccagggactcgaatggatcggccaaatctatcccggcgacggcgacaccaactacaacggcaagttcaagggcagagccacactgaccgccgatacctctagcagcacagcctacatgcagctgagcagcctgaccagcgaagatagcgccgtgtacttctgtgcccggtccatcacaacagtcgtgggctgcgctatggactattggggccagggaacaagcgtgaccgtgtctagtacgcgtatccagaaccctgatcctgccgtgtaccagctgcgggatagcaagagcagcgacaagagcgtgtgtctgttcaccgacttcgacagccagaccaacgtgtcccagagcaaggactccgacgtgtacatcaccgataagtgcgtgctggacatgcggagcatggacttcaagagcaactccgccgtggcctggtccaacaagtccgatttcgcctgcgccaacgccttcaacaacagcattatccccgaggacacattcttcccaagccccgagagcagctgcgacgtgaagctggtggaaaagagcttcgagacagacaccaacctgaacttccagaacctgagcgtgatcggcttcagaatcctgctgctgaaagtggccggctttaacctgctgatgaccctgcggctgtggtccagctaa

SEQ ID NO: 8188 - DNA, 1959 bp, synthetic construct
  source 1..1959: mol_type = other DNA
atggccttaccagtgaccgccttgctcctgccgctggccttgctgctccacgccgccaggccggcatgcagcagcgaggaccgctaccgcggtaccggcggaggcggatctggcggcggaggtagcggtggcggaggatctgaattcgacatccagatgacacagagccctagcagcctgtctgccagcgtgggagacagagtgaccatcacatgcaaggccagcgaccacatcaacaactggctggcctggtatcagcagaagcctggacaggcccctaagctgctgatctacggcgctaccacactggaaacaggcgtgcccagcagattttctggcagcggctctggcaccgactacaccctgacaatatccagcctccagcctgaggacttcgccacctactactgtcagcagagctggaacaccccttggacattcggccagggcaccaagctggaaatcaagagactcgaggacctgaagaacgtgttcccacctgaggtggccgtgttcgagcctagcgaggccgagatcagccacacccagaaagccaccctcgtgtgcctggctaccggcttctaccccgaccatgtggaactgtcttggtgggtcaacggcaaagaggtgcacagcggcgtgtgtaccgacccccagccactgaaagaacagcccgccctgaacgacagccggtactgcctgagcagcagactgagagtgtccgccaccttctggcagaacccccggaaccacttcagatgccaggtgcagttctacggcctgagcgagaacgacgagtggacccaggacagagccaagcccgtgacccagatcgtgtctgccgaagcctggggcagagccgattgcggctttaccagcgagagctaccagcagggcgtgctgagcgccaccatcctgtacgagatcctgctgggcaaggccaccctgtacgccgtgctggtgtctgccctggtgctgatggctatggtcaagcggaaggacagccggggaagggccaagcgatctggatctggagcaacaaacttctcactactcaaacaagcaggtgacgtggaggagaatcccgggcctactagtgccaccatggactggatttggcgcatccttttccttgtcggcgctgctaccggcgcccattccttcgaacaagttcagcttcaacagcctggcgctgagctggtcaaacctggcgcttctgtgaagatgagctgcaaagccagcggctacgccttcagcagctactggatcaactggatgaagcagaaacccggccagggactcgaatggatcggccaaatctatcccggcgacggcgacaccaactacaacggcaagttcaagggcagagccacactgaccgccgatacctctagcagcacagcctacatgcagctgagcagcctgaccagcgaagatagcgccgtgtacttctgtgcccggtccatcacaacagtcgtgggctgcgctatggactattggggccagggaacaagcgtgaccgtgtctagtacgcgtatccagaaccctgatcctgccgtgtaccagctgcgggatagcaagagcagcgacaagagcgtgtgtctgttcaccgacttcgacagccagaccaacgtgtcccagagcaaggactccgacgtgtacatcaccgataagtgcgtgctggacatgcggagcatggacttcaagagcaactccgccgtggcctggtccaacaagtccgatttcgcctgcgccaacgccttcaacaacagcattatccccgaggacacattcttcccaagccccgagagcagctgcgacgtgaagctggtggaaaagagcttcgagacagacaccaacctgaacttccagaacctgagcgtgatcggcttcagaatcctgctgctgaaagtggccggctttaacctgctgatgaccctgcggctgtggtccagctaa

SEQ ID NO: 8189 - DNA, 1959 bp, synthetic construct
  source 1..1959: mol_type = other DNA
atggccttaccagtgaccgccttgctcctgccgctggccttgctgctccacgccgccaggccggcatgccacagcgaggaccgctaccgcggtaccggcggaggcggatctggcggcggaggtagcggtggcggaggatctgaattcgacatccagatgacacagagccctagcagcctgtctgccagcgtgggagacagagtgaccatcacatgcaaggccagcgaccacatcaacaactggctggcctggtatcagcagaagcctggacaggcccctaagctgctgatctacggcgctaccacactggaaacaggcgtgcccagcagattttctggcagcggctctggcaccgactacaccctgacaatatccagcctccagcctgaggacttcgccacctactactgtcagcagagctggaacaccccttggacattcggccagggcaccaagctggaaatcaagagactcgaggacctgaagaacgtgttcccacctgaggtggccgtgttcgagcctagcgaggccgagatcagccacacccagaaagccaccctcgtgtgcctggctaccggcttctaccccgaccatgtggaactgtcttggtgggtcaacggcaaagaggtgcacagcggcgtgtgtaccgacccccagccactgaaagaacagcccgccctgaacgacagccggtactgcctgagcagcagactgagagtgtccgccaccttctggcagaacccccggaaccacttcagatgccaggtgcagttctacggcctgagcgagaacgacgagtggacccaggacagagccaagcccgtgacccagatcgtgtctgccgaagcctggggcagagccgattgcggctttaccagcgagagctaccagcagggcgtgctgagcgccaccatcctgtacgagatcctgctgggcaaggccaccctgtacgccgtgctggtgtctgccctggtgctgatggctatggtcaagcggaaggacagccggggaagggccaagcgatctggatctggagcaacaaacttctcactactcaaacaagcaggtgacgtggaggagaatcccgggcctactagtgccaccatggactggatttggcgcatccttttccttgtcggcgctgctaccggcgcccattccttcgaacaagttcagcttcaacagcctggcgctgagctggtcaaacctggcgcttctgtgaagatgagctgcaaagccagcggctacgccttcagcagctactggatcaactggatgaagcagaaacccggccagggactcgaatggatcggccaaatctatcccggcgacggcgacaccaactacaacggcaagttcaagggcagagccacactgaccgccgatacctctagcagcacagcctacatgcagctgagcagcctgaccagcgaagatagcgccgtgtacttctgtgcccggtccatcacaacagtcgtgggctgcgctatggactattggggccagggaacaagcgtgaccgtgtctagtacgcgtatccagaaccctgatcctgccgtgtaccagctgcgggatagcaagagcagcgacaagagcgtgtgtctgttcaccgacttcgacagccagaccaacgtgtcccagagcaaggactccgacgtgtacatcaccgataagtgcgtgctggacatgcggagcatggacttcaagagcaactccgccgtggcctggtccaacaagtccgatttcgcctgcgccaacgccttcaacaacagcattatccccgaggacacattcttcccaagccccgagagcagctgcgacgtgaagctggtggaaaagagcttcgagacagacaccaacctgaacttccagaacctgagcgtgatcggcttcagaatcctgctgctgaaagtggccggctttaacctgctgatgaccctgcggctgtggtccagctaa

SEQ ID NO: 8190 - DNA, 1959 bp, synthetic construct
  source 1..1959: mol_type = other DNA
atggccttaccagtgaccgccttgctcctgccgctggccttgctgctccacgccgccaggccggcatgcgacagcgaggaccgctaccgcggtaccggcggaggcggatctggcggcggaggtagcggtggcggaggatctgaattcgacatccagatgacacagagccctagcagcctgtctgccagcgtgggagacagagtgaccatcacatgcaaggccagcgaccacatcaacaactggctggcctggtatcagcagaagcctggacaggcccctaagctgctgatctacggcgctaccacactggaaacaggcgtgcccagcagattttctggcagcggctctggcaccgactacaccctgacaatatccagcctccagcctgaggacttcgccacctactactgtcagcagagctggaacaccccttggacattcggccagggcaccaagctggaaatcaagagactcgaggacctgaagaacgtgttcccacctgaggtggccgtgttcgagcctagcgaggccgagatcagccacacccagaaagccaccctcgtgtgcctggctaccggcttctaccccgaccatgtggaactgtcttggtgggtcaacggcaaagaggtgcacagcggcgtgtgtaccgacccccagccactgaaagaacagcccgccctgaacgacagccggtactgcctgagcagcagactgagagtgtccgccaccttctggcagaacccccggaaccacttcagatgccaggtgcagttctacggcctgagcgagaacgacgagtggacccaggacagagccaagcccgtgacccagatcgtgtctgccgaagcctggggcagagccgattgcggctttaccagcgagagctaccagcagggcgtgctgagcgccaccatcctgtacgagatcctgctgggcaaggccaccctgtacgccgtgctggtgtctgccctggtgctgatggctatggtcaagcggaaggacagccggggaagggccaagcgatctggatctggagcaacaaacttctcactactcaaacaagcaggtgacgtggaggagaatcccgggcctactagtgccaccatggactggatttggcgcatccttttccttgtcggcgctgctaccggcgcccattccttcgaacaagttcagcttcaacagcctggcgctgagctggtcaaacctggcgcttctgtgaagatgagctgcaaagccagcggctacgccttcagcagctactggatcaactggatgaagcagaaacccggccagggactcgaatggatcggccaaatctatcccggcgacggcgacaccaactacaacggcaagttcaagggcagagccacactgaccgccgatacctctagcagcacagcctacatgcagctgagcagcctgaccagcgaagatagcgccgtgtacttctgtgcccggtccatcacaacagtcgtgggctgcgctatggactattggggccagggaacaagcgtgaccgtgtctagtacgcgtatccagaaccctgatcctgccgtgtaccagctgcgggatagcaagagcagcgacaagagcgtgtgtctgttcaccgacttcgacagccagaccaacgtgtcccagagcaaggactccgacgtgtacatcaccgataagtgcgtgctggacatgcggagcatggacttcaagagcaactccgccgtggcctggtccaacaagtccgatttcgcctgcgccaacgccttcaacaacagcattatccccgaggacacattcttcccaagccccgagagcagctgcgacgtgaagctggtggaaaagagcttcgagacagacaccaacctgaacttccagaacctgagcgtgatcggcttcagaatcctgctgctgaaagtggccggctttaacctgctgatgaccctgcggctgtggtccagctaa

SEQ ID NO: 8191 - DNA, 1959 bp, synthetic construct
  source 1..1959: mol_type = other DNA
atggccttaccagtgaccgccttgctcctgccgctggccttgctgctccacgccgccaggccggcatgcttcagcgaggaccgctaccgcggtaccggcggaggcggatctggcggcggaggtagcggtggcggaggatctgaattcgacatccagatgacacagagccctagcagcctgtctgccagcgtgggagacagagtgaccatcacatgcaaggccagcgaccacatcaacaactggctggcctggtatcagcagaagcctggacaggcccctaagctgctgatctacggcgctaccacactggaaacaggcgtgcccagcagattttctggcagcggctctggcaccgactacaccctgacaatatccagcctccagcctgaggacttcgccacctactactgtcagcagagctggaacaccccttggacattcggccagggcaccaagctggaaatcaagagactcgaggacctgaagaacgtgttcccacctgaggtggccgtgttcgagcctagcgaggccgagatcagccacacccagaaagccaccctcgtgtgcctggctaccggcttctaccccgaccatgtggaactgtcttggtgggtcaacggcaaagaggtgcacagcggcgtgtgtaccgacccccagccactgaaagaacagcccgccctgaacgacagccggtactgcctgagcagcagactgagagtgtccgccaccttctggcagaacccccggaaccacttcagatgccaggtgcagttctacggcctgagcgagaacgacgagtggacccaggacagagccaagcccgtgacccagatcgtgtctgccgaagcctggggcagagccgattgcggctttaccagcgagagctaccagcagggcgtgctgagcgccaccatcctgtacgagatcctgctgggcaaggccaccctgtacgccgtgctggtgtctgccctggtgctgatggctatggtcaagcggaaggacagccggggaagggccaagcgatctggatctggagcaacaaacttctcactactcaaacaagcaggtgacgtggaggagaatcccgggcctactagtgccaccatggactggatttggcgcatccttttccttgtcggcgctgctaccggcgcccattccttcgaacaagttcagcttcaacagcctggcgctgagctggtcaaacctggcgcttctgtgaagatgagctgcaaagccagcggctacgccttcagcagctactggatcaactggatgaagcagaaacccggccagggactcgaatggatcggccaaatctatcccggcgacggcgacaccaactacaacggcaagttcaagggcagagccacactgaccgccgatacctctagcagcacagcctacatgcagctgagcagcctgaccagcgaagatagcgccgtgtacttctgtgcccggtccatcacaacagtcgtgggctgcgctatggactattggggccagggaacaagcgtgaccgtgtctagtacgcgtatccagaaccctgatcctgccgtgtaccagctgcgggatagcaagagcagcgacaagagcgtgtgtctgttcaccgacttcgacagccagaccaacgtgtcccagagcaaggactccgacgtgtacatcaccgataagtgcgtgctggacatgcggagcatggacttcaagagcaactccgccgtggcctggtccaacaagtccgatttcgcctgcgccaacgccttcaacaacagcattatccccgaggacacattcttcccaagccccgagagcagctgcgacgtgaagctggtggaaaagagcttcgagacagacaccaacctgaacttccagaacctgagcgtgatcggcttcagaatcctgctgctgaaagtggccggctttaacctgctgatgaccctgcggctgtggtccagctaa

SEQ ID NO: 8192 - DNA, 1959 bp, synthetic construct
  source 1..1959: mol_type = other DNA
atggccttaccagtgaccgccttgctcctgccgctggccttgctgctccacgccgccaggccggcatgccgcagcgaggaccgcttccgcggtaccggcggaggcggatctggcggcggaggtagcggtggcggaggatctgaattcgacatccagatgacacagagccctagcagcctgtctgccagcgtgggagacagagtgaccatcacatgcaaggccagcgaccacatcaacaactggctggcctggtatcagcagaagcctggacaggcccctaagctgctgatctacggcgctaccacactggaaacaggcgtgcccagcagattttctggcagcggctctggcaccgactacaccctgacaatatccagcctccagcctgaggacttcgccacctactactgtcagcagagctggaacaccccttggacattcggccagggcaccaagctggaaatcaagagactcgaggacctgaagaacgtgttcccacctgaggtggccgtgttcgagcctagcgaggccgagatcagccacacccagaaagccaccctcgtgtgcctggctaccggcttctaccccgaccatgtggaactgtcttggtgggtcaacggcaaagaggtgcacagcggcgtgtgtaccgacccccagccactgaaagaacagcccgccctgaacgacagccggtactgcctgagcagcagactgagagtgtccgccaccttctggcagaacccccggaaccacttcagatgccaggtgcagttctacggcctgagcgagaacgacgagtggacccaggacagagccaagcccgtgacccagatcgtgtctgccgaagcctggggcagagccgattgcggctttaccagcgagagctaccagcagggcgtgctgagcgccaccatcctgtacgagatcctgctgggcaaggccaccctgtacgccgtgctggtgtctgccctggtgctgatggctatggtcaagcggaaggacagccggggaagggccaagcgatctggatctggagcaacaaacttctcactactcaaacaagcaggtgacgtggaggagaatcccgggcctactagtgccaccatggactggatttggcgcatccttttccttgtcggcgctgctaccggcgcccattccttcgaacaagttcagcttcaacagcctggcgctgagctggtcaaacctggcgcttctgtgaagatgagctgcaaagccagcggctacgccttcagcagctactggatcaactggatgaagcagaaacccggccagggactcgaatggatcggccaaatctatcccggcgacggcgacaccaactacaacggcaagttcaagggcagagccacactgaccgccgatacctctagcagcacagcctacatgcagctgagcagcctgaccagcgaagatagcgccgtgtacttctgtgcccggtccatcacaacagtcgtgggctgcgctatggactattggggccagggaacaagcgtgaccgtgtctagtacgcgtatccagaaccctgatcctgccgtgtaccagctgcgggatagcaagagcagcgacaagagcgtgtgtctgttcaccgacttcgacagccagaccaacgtgtcccagagcaaggactccgacgtgtacatcaccgataagtgcgtgctggacatgcggagcatggacttcaagagcaactccgccgtggcctggtccaacaagtccgatttcgcctgcgccaacgccttcaacaacagcattatccccgaggacacattcttcccaagccccgagagcagctgcgacgtgaagctggtggaaaagagcttcgagacagacaccaacctgaacttccagaacctgagcgtgatcggcttcagaatcctgctgctgaaagtggccggctttaacctgctgatgaccctgcggctgtggtccagctaa

SEQ ID NO: 8193 - DNA, 1959 bp, synthetic construct
  source 1..1959: mol_type = other DNA
atggccttaccagtgaccgccttgctcctgccgctggccttgctgctccacgccgccaggccggcatgccgcagcgaggaccgccaccgcggtaccggcggaggcggatctggcggcggaggtagcggtggcggaggatctgaattcgacatccagatgacacagagccctagcagcctgtctgccagcgtgggagacagagtgaccatcacatgcaaggccagcgaccacatcaacaactggctggcctggtatcagcagaagcctggacaggcccctaagctgctgatctacggcgctaccacactggaaacaggcgtgcccagcagattttctggcagcggctctggcaccgactacaccctgacaatatccagcctccagcctgaggacttcgccacctactactgtcagcagagctggaacaccccttggacattcggccagggcaccaagctggaaatcaagagactcgaggacctgaagaacgtgttcccacctgaggtggccgtgttcgagcctagcgaggccgagatcagccacacccagaaagccaccctcgtgtgcctggctaccggcttctaccccgaccatgtggaactgtcttggtgggtcaacggcaaagaggtgcacagcggcgtgtgtaccgacccccagccactgaaagaacagcccgccctgaacgacagccggtactgcctgagcagcagactgagagtgtccgccaccttctggcagaacccccggaaccacttcagatgccaggtgcagttctacggcctgagcgagaacgacgagtggacccaggacagagccaagcccgtgacccagatcgtgtctgccgaagcctggggcagagccgattgcggctttaccagcgagagctaccagcagggcgtgctgagcgccaccatcctgtacgagatcctgctgggcaaggccaccctgtacgccgtgctggtgtctgccctggtgctgatggctatggtcaagcggaaggacagccggggaagggccaagcgatctggatctggagcaacaaacttctcactactcaaacaagcaggtgacgtggaggagaatcccgggcctactagtgccaccatggactggatttggcgcatccttttccttgtcggcgctgctaccggcgcccattccttcgaacaagttcagcttcaacagcctggcgctgagctggtcaaacctggcgcttctgtgaagatgagctgcaaagccagcggctacgccttcagcagctactggatcaactggatgaagcagaaacccggccagggactcgaatggatcggccaaatctatcccggcgacggcgacaccaactacaacggcaagttcaagggcagagccacactgaccgccgatacctctagcagcacagcctacatgcagctgagcagcctgaccagcgaagatagcgccgtgtacttctgtgcccggtccatcacaacagtcgtgggctgcgctatggactattggggccagggaacaagcgtgaccgtgtctagtacgcgtatccagaaccctgatcctgccgtgtaccagctgcgggatagcaagagcagcgacaagagcgtgtgtctgttcaccgacttcgacagccagaccaacgtgtcccagagcaaggactccgacgtgtacatcaccgataagtgcgtgctggacatgcggagcatggacttcaagagcaactccgccgtggcctggtccaacaagtccgatttcgcctgcgccaacgccttcaacaacagcattatccccgaggacacattcttcccaagccccgagagcagctgcgacgtgaagctggtggaaaagagcttcgagacagacaccaacctgaacttccagaacctgagcgtgatcggcttcagaatcctgctgctgaaagtggccggctttaacctgctgatgaccctgcggctgtggtccagctaa

SEQ ID NO: 8194 - DNA, 1962 bp, synthetic construct; identical to SEQ ID NO: 8086
  source 1..1962: mol_type = other DNA

SEQ ID NO: 8195 - DNA, 1962 bp, synthetic construct; identical to SEQ ID NO: 8103
  source 1..1962: mol_type = other DNA

SEQ ID NO: 8196 - DNA, 1962 bp, synthetic construct; identical to SEQ ID NO: 8104
  source 1..1962: mol_type = other DNA

SEQ ID NO: 8197 - DNA, 1962 bp, synthetic construct; identical to SEQ ID NO: 8105
  source 1..1962: mol_type = other DNA

SEQ ID NO: 8198 - DNA, 1962 bp, synthetic construct; identical to SEQ ID NO: 8106
  source 1..1962: mol_type = other DNA

SEQ ID NO: 8199 - DNA, 1962 bp, synthetic construct; identical to SEQ ID NO: 8107
  source 1..1962: mol_type = other DNA

SEQ ID NO: 8200 - DNA, 1962 bp, synthetic construct; identical to SEQ ID NO: 8108
  source 1..1962: mol_type = other DNA

SEQ ID NO: 8201 - DNA, 1962 bp, synthetic construct; identical to SEQ ID NO: 8109
  source 1..1962: mol_type = other DNA

SEQ ID NO: 8202 - DNA, 1962 bp, synthetic construct; identical to SEQ ID NO: 8110
  source 1..1962: mol_type = other DNA

SEQ ID NO: 8203 - DNA, 1962 bp, synthetic construct; identical to SEQ ID NO: 8111
  source 1..1962: mol_type = other DNA

SEQ ID NO: 8204 - DNA, 1962 bp, synthetic construct; identical to SEQ ID NO: 8112
  source 1..1962: mol_type = other DNA

SEQ ID NO: 8205 - DNA, 1962 bp, synthetic construct; identical to SEQ ID NO: 8113
  source 1..1962: mol_type = other DNA

SEQ ID NO: 8206 - DNA, 1962 bp, synthetic construct; identical to SEQ ID NO: 8116
  source 1..1962: mol_type = other DNA

SEQ ID NO: 8207 - DNA, 1962 bp, synthetic construct; identical to SEQ ID NO: 8117
  source 1..1962: mol_type = other DNA

SEQ ID NO: 8208 - DNA, 1962 bp, synthetic construct
  source 1..1962: mol_type = other DNA
atggccttaccagtgaccgccttgctcctgccgctggccttgctgctccacgccgccaggccggcatgcgcccgcagcgagtggcgctaccgcggtaccggcggaggcggatctggcggcggaggtagcggtggcggaggatctgaattcgacatccagatgacacagagccctagcagcctgtctgccagcgtgggagacagagtgaccatcacatgcaaggccagcgaccacatcaacaactggctggcctggtatcagcagaagcctggacaggcccctaagctgctgatctacggcgctaccacactggaaacaggcgtgcccagcagattttctggcagcggctctggcaccgactacaccctgacaatatccagcctccagcctgaggacttcgccacctactactgtcagcagagctggaacaccccttggacattcggccagggcaccaagctggaaatcaagagactcgaggacctgaagaacgtgttcccacctgaggtggccgtgttcgagcctagcgaggccgagatcagccacacccagaaagccaccctcgtgtgcctggctaccggcttctaccccgaccatgtggaactgtcttggtgggtcaacggcaaagaggtgcacagcggcgtgtgtaccgacccccagccactgaaagaacagcccgccctgaacgacagccggtactgcctgagcagcagactgagagtgtccgccaccttctggcagaacccccggaaccacttcagatgccaggtgcagttctacggcctgagcgagaacgacgagtggacccaggacagagccaagcccgtgacccagatcgtgtctgccgaagcctggggcagagccgattgcggctttaccagcgagagctaccagcagggcgtgctgagcgccaccatcctgtacgagatcctgctgggcaaggccaccctgtacgccgtgctggtgtctgccctggtgctgatggctatggtcaagcggaaggacagccggggaagggccaagcgatctggatctggagcaacaaacttctcactactcaaacaagcaggtgacgtggaggagaatcccgggcctactagtgccaccatggactggatttggcgcatccttttccttgtcggcgctgctaccggcgcccattccttcgaacaagttcagcttcaacagcctggcgctgagctggtcaaacctggcgcttctgtgaagatgagctgcaaagccagcggctacgccttcagcagctactggatcaactggatgaagcagaaacccggccagggactcgaatggatcggccaaatctatcccggcgacggcgacaccaactacaacggcaagttcaagggcagagccacactgaccgccgatacctctagcagcacagcctacatgcagctgagcagcctgaccagcgaagatagcgccgtgtacttctgtgcccggtccatcacaacagtcgtgggctgcgctatggactattggggccagggaacaagcgtgaccgtgtctagtacgcgtatccagaaccctgatcctgccgtgtaccagctgcgggatagcaagagcagcgacaagagcgtgtgtctgttcaccgacttcgacagccagaccaacgtgtcccagagcaaggactccgacgtgtacatcaccgataagtgcgtgctggacatgcggagcatggacttcaagagcaactccgccgtggcctggtccaacaagtccgatttcgcctgcgccaacgccttcaacaacagcattatccccgaggacacattcttcccaagccccgagagcagctgcgacgtgaagctggtggaaaagagcttcgagacagacaccaacctgaacttccagaacctgagcgtgatcggcttcagaatcctgctgctgaaagtggccggctttaacctgctgatgaccctgcggctgtggtccagctaa

SEQ ID NO: 8209 - DNA, 1962 bp, synthetic construct
  source 1..1962: mol_type = other DNA
atggccttaccagtgaccgccttgctcctgccgctggccttgctgctccacgccgccaggccggcatgcgcccgcagcgagtaccgctaccgcggtaccggcggaggcggatctggcggcggaggtagcggtggcggaggatctgaattcgacatccagatgacacagagccctagcagcctgtctgccagcgtgggagacagagtgaccatcacatgcaaggccagcgaccacatcaacaactggctggcctggtatcagcagaagcctggacaggcccctaagctgctgatctacggcgctaccacactggaaacaggcgtgcccagcagattttctggcagcggctctggcaccgactacaccctgacaatatccagcctccagcctgaggacttcgccacctactactgtcagcagagctggaacaccccttggacattcggccagggcaccaagctggaaatcaagagactcgaggacctgaagaacgtgttcccacctgaggtggccgtgttcgagcctagcgaggccgagatcagccacacccagaaagccaccctcgtgtgcctggctaccggcttctaccccgaccatgtggaactgtcttggtgggtcaacggcaaagaggtgcacagcggcgtgtgtaccgacccccagccactgaaagaacagcccgccctgaacgacagccggtactgcctgagcagcagactgagagtgtccgccaccttctggcagaacccccggaaccacttcagatgccaggtgcagttctacggcctgagcgagaacgacgagtggacccaggacagagccaagcccgtgacccagatcgtgtctgccgaagcctggggcagagccgattgcggctttaccagcgagagctaccagcagggcgtgctgagcgccaccatcctgtacgagatcctgctgggcaaggccaccctgtacgccgtgctggtgtctgccctggtgctgatggctatggtcaagcggaaggacagccggggaagggccaagcgatctggatctggagcaacaaacttctcactactcaaacaagcaggtgacgtggaggagaatcccgggcctactagtgccaccatggactggatttggcgcatccttttccttgtcggcgctgctaccggcgcccattccttcgaacaagttcagcttcaacagcctggcgctgagctggtcaaacctggcgcttctgtgaagatgagctgcaaagccagcggctacgccttcagcagctactggatcaactggatgaagcagaaacccggccagggactcgaatggatcggccaaatctatcccggcgacggcgacaccaactacaacggcaagttcaagggcagagccacactgaccgccgatacctctagcagcacagcctacatgcagctgagcagcctgaccagcgaagatagcgccgtgtacttctgtgcccggtccatcacaacagtcgtgggctgcgctatggactattggggccagggaacaagcgtgaccgtgtctagtacgcgtatccagaaccctgatcctgccgtgtaccagctgcgggatagcaagagcagcgacaagagcgtgtgtctgttcaccgacttcgacagccagaccaacgtgtcccagagcaaggactccgacgtgtacatcaccgataagtgcgtgctggacatgcggagcatggacttcaagagcaactccgccgtggcctggtccaacaagtccgatttcgcctgcgccaacgccttcaacaacagcattatccccgaggacacattcttcccaagccccgagagcagctgcgacgtgaagctggtggaaaagagcttcgagacagacaccaacctgaacttccagaacctgagcgtgatcggcttcagaatcctgctgctgaaagtggccggctttaacctgctgatgaccctgcggctgtggtccagctaa

SEQ ID NO: 8210 - DNA, 1962 bp, synthetic construct
  source 1..1962: mol_type = other DNA
atggccttaccagtgaccgccttgctcctgccgctggccttgctgctccacgccgccaggccggcatgcgcccgcagcgagcgccgctaccgcggtaccggcggaggcggatctggcggcggaggtagcggtggcggaggatctgaattcgacatccagatgacacagagccctagcagcctgtctgccagcgtgggagacagagtgaccatcacatgcaaggccagcgaccacatcaacaactggctggcctggtatcagcagaagcctggacaggcccctaagctgctgatctacggcgctaccacactggaaacaggcgtgcccagcagattttctggcagcggctctggcaccgactacaccctgacaatatccagcctccagcctgaggacttcgccacctactactgtcagcagagctggaacaccccttggacattcggccagggcaccaagctggaaatcaagagactcgaggacctgaagaacgtgttcccacctgaggtggccgtgttcgagcctagcgaggccgagatcagccacacccagaaagccaccctcgtgtgcctggctaccggcttctaccccgaccatgtggaactgtcttggtgggtcaacggcaaagaggtgcacagcggcgtgtgtaccgacccccagccactgaaagaacagcccgccctgaacgacagccggtactgcctgagcagcagactgagagtgtccgccaccttctggcagaacccccggaaccacttcagatgccaggtgcagttctacggcctgagcgagaacgacgagtggacccaggacagagccaagcccgtgacccagatcgtgtctgccgaagcctggggcagagccgattgcggctttaccagcgagagctaccagcagggcgtgctgagcgccaccatcctgtacgagatcctgctgggcaaggccaccctgtacgccgtgctggtgtctgccctggtgctgatggctatggtcaagcggaaggacagccggggaagggccaagcgatctggatctggagcaacaaacttctcactactcaaacaagcaggtgacgtggaggagaatcccgggcctactagtgccaccatggactggatttggcgcatccttttccttgtcggcgctgctaccggcgcccattccttcgaacaagttcagcttcaacagcctggcgctgagctggtcaaacctggcgcttctgtgaagatgagctgcaaagccagcggctacgccttcagcagctactggatcaactggatgaagcagaaacccggccagggactcgaatggatcggccaaatctatcccggcgacggcgacaccaactacaacggcaagttcaagggcagagccacactgaccgccgatacctctagcagcacagcctacatgcagctgagcagcctgaccagcgaagatagcgccgtgtacttctgtgcccggtccatcacaacagtcgtgggctgcgctatggactattggggccagggaacaagcgtgaccgtgtctagtacgcgtatccagaaccctgatcctgccgtgtaccagctgcgggatagcaagagcagcgacaagagcgtgtgtctgttcaccgacttcgacagccagaccaacgtgtcccagagcaaggactccgacgtgtacatcaccgataagtgcgtgctggacatgcggagcatggacttcaagagcaactccgccgtggcctggtccaacaagtccgatttcgcctgcgccaacgccttcaacaacagcattatccccgaggacacattcttcccaagccccgagagcagctgcgacgtgaagctggtggaaaagagcttcgagacagacaccaacctgaacttccagaacctgagcgtgatcggcttcagaatcctgctgctgaaagtggccggctttaacctgctgatgaccctgcggctgtggtccagctaa

SEQ ID NO: 8211 - DNA, 1962 bp, synthetic construct
  source 1..1962: mol_type = other DNA
atggccttaccagtgaccgccttgctcctgccgctggccttgctgctccacgccgccaggccggcatgcgcccgcagcgaggtgcgctaccgcggtaccggcggaggcggatctggcggcggaggtagcggtggcggaggatctgaattcgacatccagatgacacagagccctagcagcctgtctgccagcgtgggagacagagtgaccatcacatgcaaggccagcgaccacatcaacaactggctggcctggtatcagcagaagcctggacaggcccctaagctgctgatctacggcgctaccacactggaaacaggcgtgcccagcagattttctggcagcggctctggcaccgactacaccctgacaatatccagcctccagcctgaggacttcgccacctactactgtcagcagagctggaacaccccttggacattcggccagggcaccaagctggaaatcaagagactcgaggacctgaagaacgtgttcccacctgaggtggccgtgttcgagcctagcgaggccgagatcagccacacccagaaagccaccctcgtgtgcctggctaccggcttctaccccgaccatgtggaactgtcttggtgggtcaacggcaaagaggtgcacagcggcgtgtgtaccgacccccagccactgaaagaacagcccgccctgaacgacagccggtactgcctgagcagcagactgagagtgtccgccaccttctggcagaacccccggaaccacttcagatgccaggtgcagttctacggcctgagcgagaacgacgagtggacccaggacagagccaagcccgtgacccagatcgtgtctgccgaagcctggggcagagccgattgcggctttaccagcgagagctaccagcagggcgtgctgagcgccaccatcctgtacgagatcctgctgggcaaggccaccctgtacgccgtgctggtgtctgccctggtgctgatggctatggtcaagcggaaggacagccggggaagggccaagcgatctggatctggagcaacaaacttctcactactcaaacaagcaggtgacgtggaggagaatcccgggcctactagtgccaccatggactggatttggcgcatccttttccttgtcggcgctgctaccggcgcccattccttcgaacaagttcagcttcaacagcctggcgctgagctggtcaaacctggcgcttctgtgaagatgagctgcaaagccagcggctacgccttcagcagctactggatcaactggatgaagcagaaacccggccagggactcgaatggatcggccaaatctatcccggcgacggcgacaccaactacaacggcaagttcaagggcagagccacactgaccgccgatacctctagcagcacagcctacatgcagctgagcagcctgaccagcgaagatagcgccgtgtacttctgtgcccggtccatcacaacagtcgtgggctgcgctatggactattggggccagggaacaagcgtgaccgtgtctagtacgcgtatccagaaccctgatcctgccgtgtaccagctgcgggatagcaagagcagcgacaagagcgtgtgtctgttcaccgacttcgacagccagaccaacgtgtcccagagcaaggactccgacgtgtacatcaccgataagtgcgtgctggacatgcggagcatggacttcaagagcaactccgccgtggcctggtccaacaagtccgatttcgcctgcgccaacgccttcaacaacagcattatccccgaggacacattcttcccaagccccgagagcagctgcgacgtgaagctggtggaaaagagcttcgagacagacaccaacctgaacttccagaacctgagcgtgatcggcttcagaatcctgctgctgaaagtggccggctttaacctgctgatgaccctgcggctgtggtccagctaa

SEQ ID NO: 8212 - DNA, 1962 bp, synthetic construct
  source 1..1962: mol_type = other DNA
atggccttaccagtgaccgccttgctcctgccgctggccttgctgctccacgccgccaggccggcatgcgcccgcatcgaggaccgctaccgcggtaccggcggaggcggatctggcggcggaggtagcggtggcggaggatctgaattcgacatccagatgacacagagccctagcagcctgtctgccagcgtgggagacagagtgaccatcacatgcaaggccagcgaccacatcaacaactggctggcctggtatcagcagaagcctggacaggcccctaagctgctgatctacggcgctaccacactggaaacaggcgtgcccagcagattttctggcagcggctctggcaccgactacaccctgacaatatccagcctccagcctgaggacttcgccacctactactgtcagcagagctggaacaccccttggacattcggccagggcaccaagctggaaatcaagagactcgaggacctgaagaacgtgttcccacctgaggtggccgtgttcgagcctagcgaggccgagatcagccacacccagaaagccaccctcgtgtgcctggctaccggcttctaccccgaccatgtggaactgtcttggtgggtcaacggcaaagaggtgcacagcggcgtgtgtaccgacccccagccactgaaagaacagcccgccctgaacgacagccggtactgcctgagcagcagactgagagtgtccgccaccttctggcagaacccccggaaccacttcagatgccaggtgcagttctacggcctgagcgagaacgacgagtggacccaggacagagccaagcccgtgacccagatcgtgtctgccgaagcctggggcagagccgattgcggctttaccagcgagagctaccagcagggcgtgctgagcgccaccatcctgtacgagatcctgctgggcaaggccaccctgtacgccgtgctggtgtctgccctggtgctgatggctatggtcaagcggaaggacagccggggaagggccaagcgatctggatctggagcaacaaacttctcactactcaaacaagcaggtgacgtggaggagaatcccgggcctactagtgccaccatggactggatttggcgcatccttttccttgtcggcgctgctaccggcgcccattccttcgaacaagttcagcttcaacagcctggcgctgagctggtcaaacctggcgcttctgtgaagatgagctgcaaagccagcggctacgccttcagcagctactggatcaactggatgaagcagaaacccggccagggactcgaatggatcggccaaatctatcccggcgacggcgacaccaactacaacggcaagttcaagggcagagccacactgaccgccgatacctctagcagcacagcctacatgcagctgagcagcctgaccagcgaagatagcgccgtgtacttctgtgcccggtccatcacaacagtcgtgggctgcgctatggactattggggccagggaacaagcgtgaccgtgtctagtacgcgtatccagaaccctgatcctgccgtgtaccagctgcgggatagcaagagcagcgacaagagcgtgtgtctgttcaccgacttcgacagccagaccaacgtgtcccagagcaaggactccgacgtgtacatcaccgataagtgcgtgctggacatgcggagcatggacttcaagagcaactccgccgtggcctggtccaacaagtccgatttcgcctgcgccaacgccttcaacaacagcattatccccgaggacacattcttcccaagccccgagagcagctgcgacgtgaagctggtggaaaagagcttcgagacagacaccaacctgaacttccagaacctgagcgtgatcggcttcagaatcctgctgctgaaagtggccggctttaacctgctgatgaccctgcggctgtggtccagctaa

SEQ ID NO: 8213 - DNA, 1962 bp, synthetic construct
  source 1..1962: mol_type = other DNA
atggccttaccagtgaccgccttgctcctgccgctggccttgctgctccacgccgccaggccggcatgcgcccgcctggaggaccgctaccgcggtaccggcggaggcggatctggcggcggaggtagcggtggcggaggatctgaattcgacatccagatgacacagagccctagcagcctgtctgccagcgtgggagacagagtgaccatcacatgcaaggccagcgaccacatcaacaactggctggcctggtatcagcagaagcctggacaggcccctaagctgctgatctacggcgctaccacactggaaacaggcgtgcccagcagattttctggcagcggctctggcaccgactacaccctgacaatatccagcctccagcctgaggacttcgccacctactactgtcagcagagctggaacaccccttggacattcggccagggcaccaagctggaaatcaagagactcgaggacctgaagaacgtgttcccacctgaggtggccgtgttcgagcctagcgaggccgagatcagccacacccagaaagccaccctcgtgtgcctggctaccggcttctaccccgaccatgtggaactgtcttggtgggtcaacggcaaagaggtgcacagcggcgtgtgtaccgacccccagccactgaaagaacagcccgccctgaacgacagccggtactgcctgagcagcagactgagagtgtccgccaccttctggcagaacccccggaaccacttcagatgccaggtgcagttctacggcctgagcgagaacgacgagtggacccaggacagagccaagcccgtgacccagatcgtgtctgccgaagcctggggcagagccgattgcggctttaccagcgagagctaccagcagggcgtgctgagcgccaccatcctgtacgagatcctgctgggcaaggccaccctgtacgccgtgctggtgtctgccctggtgctgatggctatggtcaagcggaaggacagccggggaagggccaagcgatctggatctggagcaacaaacttctcactactcaaacaagcaggtgacgtggaggagaatcccgggcctactagtgccaccatggactggatttggcgcatccttttccttgtcggcgctgctaccggcgcccattccttcgaacaagttcagcttcaacagcctggcgctgagctggtcaaacctggcgcttctgtgaagatgagctgcaaagccagcggctacgccttcagcagctactggatcaactggatgaagcagaaacccggccagggactcgaatggatcggccaaatctatcccggcgacggcgacaccaactacaacggcaagttcaagggcagagccacactgaccgccgatacctctagcagcacagcctacatgcagctgagcagcctgaccagcgaagatagcgccgtgtacttctgtgcccggtccatcacaacagtcgtgggctgcgctatggactattggggccagggaacaagcgtgaccgtgtctagtacgcgtatccagaaccctgatcctgccgtgtaccagctgcgggatagcaagagcagcgacaagagcgtgtgtctgttcaccgacttcgacagccagaccaacgtgtcccagagcaaggactccgacgtgtacatcaccgataagtgcgtgctggacatgcggagcatggacttcaagagcaactccgccgtggcctggtccaacaagtccgatttcgcctgcgccaacgccttcaacaacagcattatccccgaggacacattcttcccaagccccgagagcagctgcgacgtgaagctggtggaaaagagcttcgagacagacaccaacctgaacttccagaacctgagcgtgatcggcttcagaatcctgctgctgaaagtggccggctttaacctgctgatgaccctgcggctgtggtccagctaa

SEQ ID NO: 8214 - DNA, 1962 bp, synthetic construct
  source 1..1962: mol_type = other DNA
atggccttaccagtgaccgccttgctcctgccgctggccttgctgctccacgccgccaggccggcatgcgcccgcatggaggaccgctaccgcggtaccggcggaggcggatctggcggcggaggtagcggtggcggaggatctgaattcgacatccagatgacacagagccctagcagcctgtctgccagcgtgggagacagagtgaccatcacatgcaaggccagcgaccacatcaacaactggctggcctggtatcagcagaagcctggacaggcccctaagctgctgatctacggcgctaccacactggaaacaggcgtgcccagcagattttctggcagcggctctggcaccgactacaccctgacaatatccagcctccagcctgaggacttcgccacctactactgtcagcagagctggaacaccccttggacattcggccagggcaccaagctggaaatcaagagactcgaggacctgaagaacgtgttcccacctgaggtggccgtgttcgagcctagcgaggccgagatcagccacacccagaaagccaccctcgtgtgcctggctaccggcttctaccccgaccatgtggaactgtcttggtgggtcaacggcaaagaggtgcacagcggcgtgtgtaccgacccccagccactgaaagaacagcccgccctgaacgacagccggtactgcctgagcagcagactgagagtgtccgccaccttctggcagaacccccggaaccacttcagatgccaggtgcagttctacggcctgagcgagaacgacgagtggacccaggacagagccaagcccgtgacccagatcgtgtctgccgaagcctggggcagagccgattgcggctttaccagcgagagctaccagcagggcgtgctgagcgccaccatcctgtacgagatcctgctgggcaaggccaccctgtacgccgtgctggtgtctgccctggtgctgatggctatggtcaagcggaaggacagccggggaagggccaagcgatctggatctggagcaacaaacttctcactactcaaacaagcaggtgacgtggaggagaatcccgggcctactagtgccaccatggactggatttggcgcatccttttccttgtcggcgctgctaccggcgcccattccttcgaacaagttcagcttcaacagcctggcgctgagctggtcaaacctggcgcttctgtgaagatgagctgcaaagccagcggctacgccttcagcagctactggatcaactggatgaagcagaaacccggccagggactcgaatggatcggccaaatctatcccggcgacggcgacaccaactacaacggcaagttcaagggcagagccacactgaccgccgatacctctagcagcacagcctacatgcagctgagcagcctgaccagcgaagatagcgccgtgtacttctgtgcccggtccatcacaacagtcgtgggctgcgctatggactattggggccagggaacaagcgtgaccgtgtctagtacgcgtatccagaaccctgatcctgccgtgtaccagctgcgggatagcaagagcagcgacaagagcgtgtgtctgttcaccgacttcgacagccagaccaacgtgtcccagagcaaggactccgacgtgtacatcaccgataagtgcgtgctggacatgcggagcatggacttcaagagcaactccgccgtggcctggtccaacaagtccgatttcgcctgcgccaacgccttcaacaacagcattatccccgaggacacattcttcccaagccccgagagcagctgcgacgtgaagctggtggaaaagagcttcgagacagacaccaacctgaacttccagaacctgagcgtgatcggcttcagaatcctgctgctgaaagtggccggctttaacctgctgatgaccctgcggctgtggtccagctaa

SEQ ID NO: 8215 - DNA, 1962 bp, synthetic construct
  source 1..1962: mol_type = other DNA
atggccttaccagtgaccgccttgctcctgccgctggccttgctgctccacgccgccaggccggcatgcgcccgcgtggaggaccgctaccgcggtaccggcggaggcggatctggcggcggaggtagcggtggcggaggatctgaattcgacatccagatgacacagagccctagcagcctgtctgccagcgtgggagacagagtgaccatcacatgcaaggccagcgaccacatcaacaactggctggcctggtatcagcagaagcctggacaggcccctaagctgctgatctacggcgctaccacactggaaacaggcgtgcccagcagattttctggcagcggctctggcaccgactacaccctgacaatatccagcctccagcctgaggacttcgccacctactactgtcagcagagctggaacaccccttggacattcggccagggcaccaagctggaaatcaagagactcgaggacctgaagaacgtgttcccacctgaggtggccgtgttcgagcctagcgaggccgagatcagccacacccagaaagccaccctcgtgtgcctggctaccggcttctaccccgaccatgtggaactgtcttggtgggtcaacggcaaagaggtgcacagcggcgtgtgtaccgacccccagccactgaaagaacagcccgccctgaacgacagccggtactgcctgagcagcagactgagagtgtccgccaccttctggcagaacccccggaaccacttcagatgccaggtgcagttctacggcctgagcgagaacgacgagtggacccaggacagagccaagcccgtgacccagatcgtgtctgccgaagcctggggcagagccgattgcggctttaccagcgagagctaccagcagggcgtgctgagcgccaccatcctgtacgagatcctgctgggcaaggccaccctgtacgccgtgctggtgtctgccctggtgctgatggctatggtcaagcggaaggacagccggggaagggccaagcgatctggatctggagcaacaaacttctcactactcaaacaagcaggtgacgtggaggagaatcccgggcctactagtgccaccatggactggatttggcgcatccttttccttgtcggcgctgctaccggcgcccattccttcgaacaagttcagcttcaacagcctggcgctgagctggtcaaacctggcgcttctgtgaagatgagctgcaaagccagcggctacgccttcagcagctactggatcaactggatgaagcagaaacccggccagggactcgaatggatcggccaaatctatcccggcgacggcgacaccaactacaacggcaagttcaagggcagagccacactgaccgccgatacctctagcagcacagcctacatgcagctgagcagcctgaccagcgaagatagcgccgtgtacttctgtgcccggtccatcacaacagtcgtgggctgcgctatggactattggggccagggaacaagcgtgaccgtgtctagtacgcgtatccagaaccctgatcctgccgtgtaccagctgcgggatagcaagagcagcgacaagagcgtgtgtctgttcaccgacttcgacagccagaccaacgtgtcccagagcaaggactccgacgtgtacatcaccgataagtgcgtgctggacatgcggagcatggacttcaagagcaactccgccgtggcctggtccaacaagtccgatttcgcctgcgccaacgccttcaacaacagcattatccccgaggacacattcttcccaagccccgagagcagctgcgacgtgaagctggtggaaaagagcttcgagacagacaccaacctgaacttccagaacctgagcgtgatcggcttcagaatcctgctgctgaaagtggccggctttaacctgctgatgaccctgcggctgtggtccagctaa

SEQ ID NO: 8216 - DNA, 1962 bp, synthetic construct
  source 1..1962: mol_type = other DNA
atggccttaccagtgaccgccttgctcctgccgctggccttgctgctccacgccgccaggccggcatgcgcccgcgccgaggaccgctaccgcggtaccggcggaggcggatctggcggcggaggtagcggtggcggaggatctgaattcgacatccagatgacacagagccctagcagcctgtctgccagcgtgggagacagagtgaccatcacatgcaaggccagcgaccacatcaacaactggctggcctggtatcagcagaagcctggacaggcccctaagctgctgatctacggcgctaccacactggaaacaggcgtgcccagcagattttctggcagcggctctggcaccgactacaccctgacaatatccagcctccagcctgaggacttcgccacctactactgtcagcagagctggaacaccccttggacattcggccagggcaccaagctggaaatcaagagactcgaggacctgaagaacgtgttcccacctgaggtggccgtgttcgagcctagcgaggccgagatcagccacacccagaaagccaccctcgtgtgcctggctaccggcttctaccccgaccatgtggaactgtcttggtgggtcaacggcaaagaggtgcacagcggcgtgtgtaccgacccccagccactgaaagaacagcccgccctgaacgacagccggtactgcctgagcagcagactgagagtgtccgccaccttctggcagaacccccggaaccacttcagatgccaggtgcagttctacggcctgagcgagaacgacgagtggacccaggacagagccaagcccgtgacccagatcgtgtctgccgaagcctggggcagagccgattgcggctttaccagcgagagctaccagcagggcgtgctgagcgccaccatcctgtacgagatcctgctgggcaaggccaccctgtacgccgtgctggtgtctgccctggtgctgatggctatggtcaagcggaaggacagccggggaagggccaagcgatctggatctggagcaacaaacttctcactactcaaacaagcaggtgacgtggaggagaatcccgggcctactagtgccaccatggactggatttggcgcatccttttccttgtcggcgctgctaccggcgcccattccttcgaacaagttcagcttcaacagcctggcgctgagctggtcaaacctggcgcttctgtgaagatgagctgcaaagccagcggctacgccttcagcagctactggatcaactggatgaagcagaaacccggccagggactcgaatggatcggccaaatctatcccggcgacggcgacaccaactacaacggcaagttcaagggcagagccacactgaccgccgatacctctagcagcacagcctacatgcagctgagcagcctgaccagcgaagatagcgccgtgtacttctgtgcccggtccatcacaacagtcgtgggctgcgctatggactattggggccagggaacaagcgtgaccgtgtctagtacgcgtatccagaaccctgatcctgccgtgtaccagctgcgggatagcaagagcagcgacaagagcgtgtgtctgttcaccgacttcgacagccagaccaacgtgtcccagagcaaggactccgacgtgtacatcaccgataagtgcgtgctggacatgcggagcatggacttcaagagcaactccgccgtggcctggtccaacaagtccgatttcgcctgcgccaacgccttcaacaacagcattatccccgaggacacattcttcccaagccccgagagcagctgcgacgtgaagctggtggaaaagagcttcgagacagacaccaacctgaacttccagaacctgagcgtgatcggcttcagaatcctgctgctgaaagtggccggctttaacctgctgatgaccctgcggctgtggtccagctaa

SEQ ID NO: 8217 - DNA, 1962 bp, synthetic construct
  source 1..1962: mol_type = other DNA
atggccttaccagtgaccgccttgctcctgccgctggccttgctgctccacgccgccaggccggcatgcgcccgcttcgaggaccgctaccgcggtaccggcggaggcggatctggcggcggaggtagcggtggcggaggatctgaattcgacatccagatgacacagagccctagcagcctgtctgccagcgtgggagacagagtgaccatcacatgcaaggccagcgaccacatcaacaactggctggcctggtatcagcagaagcctggacaggcccctaagctgctgatctacggcgctaccacactggaaacaggcgtgcccagcagattttctggcagcggctctggcaccgactacaccctgacaatatccagcctccagcctgaggacttcgccacctactactgtcagcagagctggaacaccccttggacattcggccagggcaccaagctggaaatcaagagactcgaggacctgaagaacgtgttcccacctgaggtggccgtgttcgagcctagcgaggccgagatcagccacacccagaaagccaccctcgtgtgcctggctaccggcttctaccccgaccatgtggaactgtcttggtgggtcaacggcaaagaggtgcacagcggcgtgtgtaccgacccccagccactgaaagaacagcccgccctgaacgacagccggtactgcctgagcagcagactgagagtgtccgccaccttctggcagaacccccggaaccacttcagatgccaggtgcagttctacggcctgagcgagaacgacgagtggacccaggacagagccaagcccgtgacccagatcgtgtctgccgaagcctggggcagagccgattgcggctttaccagcgagagctaccagcagggcgtgctgagcgccaccatcctgtacgagatcctgctgggcaaggccaccctgtacgccgtgctggtgtctgccctggtgctgatggctatggtcaagcggaaggacagccggggaagggccaagcgatctggatctggagcaacaaacttctcactactcaaacaagcaggtgacgtggaggagaatcccgggcctactagtgccaccatggactggatttggcgcatccttttccttgtcggcgctgctaccggcgcccattccttcgaacaagttcagcttcaacagcctggcgctgagctggtcaaacctggcgcttctgtgaagatgagctgcaaagccagcggctacgccttcagcagctactggatcaactggatgaagcagaaacccggccagggactcgaatggatcggccaaatctatcccggcgacggcgacaccaactacaacggcaagttcaagggcagagccacactgaccgccgatacctctagcagcacagcctacatgcagctgagcagcctgaccagcgaagatagcgccgtgtacttctgtgcccggtccatcacaacagtcgtgggctgcgctatggactattggggccagggaacaagcgtgaccgtgtctagtacgcgtatccagaaccctgatcctgccgtgtaccagctgcgggatagcaagagcagcgacaagagcgtgtgtctgttcaccgacttcgacagccagaccaacgtgtcccagagcaaggactccgacgtgtacatcaccgataagtgcgtgctggacatgcggagcatggacttcaagagcaactccgccgtggcctggtccaacaagtccgatttcgcctgcgccaacgccttcaacaacagcattatccccgaggacacattcttcccaagccccgagagcagctgcgacgtgaagctggtggaaaagagcttcgagacagacaccaacctgaacttccagaacctgagcgtgatcggcttcagaatcctgctgctgaaagtggccggctttaacctgctgatgaccctgcggctgtggtccagctaa

SEQ ID NO: 8218 - DNA, 1962 bp, synthetic construct
  source 1..1962: mol_type = other DNA
atggccttaccagtgaccgccttgctcctgccgctggccttgctgctccacgccgccaggccggcatgcgcccgccacgaggaccgctaccgcggtaccggcggaggcggatctggcggcggaggtagcggtggcggaggatctgaattcgacatccagatgacacagagccctagcagcctgtctgccagcgtgggagacagagtgaccatcacatgcaaggccagcgaccacatcaacaactggctggcctggtatcagcagaagcctggacaggcccctaagctgctgatctacggcgctaccacactggaaacaggcgtgcccagcagattttctggcagcggctctggcaccgactacaccctgacaatatccagcctccagcctgaggacttcgccacctactactgtcagcagagctggaacaccccttggacattcggccagggcaccaagctggaaatcaagagactcgaggacctgaagaacgtgttcccacctgaggtggccgtgttcgagcctagcgaggccgagatcagccacacccagaaagccaccctcgtgtgcctggctaccggcttctaccccgaccatgtggaactgtcttggtgggtcaacggcaaagaggtgcacagcggcgtgtgtaccgacccccagccactgaaagaacagcccgccctgaacgacagccggtactgcctgagcagcagactgagagtgtccgccaccttctggcagaacccccggaaccacttcagatgccaggtgcagttctacggcctgagcgagaacgacgagtggacccaggacagagccaagcccgtgacccagatcgtgtctgccgaagcctggggcagagccgattgcggctttaccagcgagagctaccagcagggcgtgctgagcgccaccatcctgtacgagatcctgctgggcaaggccaccctgtacgccgtgctggtgtctgccctggtgctgatggctatggtcaagcggaaggacagccggggaagggccaagcgatctggatctggagcaacaaacttctcactactcaaacaagcaggtgacgtggaggagaatcccgggcctactagtgccaccatggactggatttggcgcatccttttccttgtcggcgctgctaccggcgcccattccttcgaacaagttcagcttcaacagcctggcgctgagctggtcaaacctggcgcttctgtgaagatgagctgcaaagccagcggctacgccttcagcagctactggatcaactggatgaagcagaaacccggccagggactcgaatggatcggccaaatctatcccggcgacggcgacaccaactacaacggcaagttcaagggcagagccacactgaccgccgatacctctagcagcacagcctacatgcagctgagcagcctgaccagcgaagatagcgccgtgtacttctgtgcccggtccatcacaacagtcgtgggctgcgctatggactattggggccagggaacaagcgtgaccgtgtctagtacgcgtatccagaaccctgatcctgccgtgtaccagctgcgggatagcaagagcagcgacaagagcgtgtgtctgttcaccgacttcgacagccagaccaacgtgtcccagagcaaggactccgacgtgtacatcaccgataagtgcgtgctggacatgcggagcatggacttcaagagcaactccgccgtggcctggtccaacaagtccgatttcgcctgcgccaacgccttcaacaacagcattatccccgaggacacattcttcccaagccccgagagcagctgcgacgtgaagctggtggaaaagagcttcgagacagacaccaacctgaacttccagaacctgagcgtgatcggcttcagaatcctgctgctgaaagtggccggctttaacctgctgatgaccctgcggctgtggtccagctaa

SEQ ID NO: 8219 - DNA, 1962 bp, synthetic construct
  source 1..1962: mol_type = other DNA
atggccttaccagtgaccgccttgctcctgccgctggccttgctgctccacgccgccaggccggcatgcgcccgcggcgaggaccgctaccgcggtaccggcggaggcggatctggcggcggaggtagcggtggcggaggatctgaattcgacatccagatgacacagagccctagcagcctgtctgccagcgtgggagacagagtgaccatcacatgcaaggccagcgaccacatcaacaactggctggcctggtatcagcagaagcctggacaggcccctaagctgctgatctacggcgctaccacactggaaacaggcgtgcccagcagattttctggcagcggctctggcaccgactacaccctgacaatatccagcctccagcctgaggacttcgccacctactactgtcagcagagctggaacaccccttggacattcggccagggcaccaagctggaaatcaagagactcgaggacctgaagaacgtgttcccacctgaggtggccgtgttcgagcctagcgaggccgagatcagccacacccagaaagccaccctcgtgtgcctggctaccggcttctaccccgaccatgtggaactgtcttggtgggtcaacggcaaagaggtgcacagcggcgtgtgtaccgacccccagccactgaaagaacagcccgccctgaacgacagccggtactgcctgagcagcagactgagagtgtccgccaccttctggcagaacccccggaaccacttcagatgccaggtgcagttctacggcctgagcgagaacgacgagtggacccaggacagagccaagcccgtgacccagatcgtgtctgccgaagcctggggcagagccgattgcggctttaccagcgagagctaccagcagggcgtgctgagcgccaccatcctgtacgagatcctgctgggcaaggccaccctgtacgccgtgctggtgtctgccctggtgctgatggctatggtcaagcggaaggacagccggggaagggccaagcgatctggatctggagcaacaaacttctcactactcaaacaagcaggtgacgtggaggagaatcccgggcctactagtgccaccatggactggatttggcgcatccttttccttgtcggcgctgctaccggcgcccattccttcgaacaagttcagcttcaacagcctggcgctgagctggtcaaacctggcgcttctgtgaagatgagctgcaaagccagcggctacgccttcagcagctactggatcaactggatgaagcagaaacccggccagggactcgaatggatcggccaaatctatcccggcgacggcgacaccaactacaacggcaagttcaagggcagagccacactgaccgccgatacctctagcagcacagcctacatgcagctgagcagcctgaccagcgaagatagcgccgtgtacttctgtgcccggtccatcacaacagtcgtgggctgcgctatggactattggggccagggaacaagcgtgaccgtgtctagtacgcgtatccagaaccctgatcctgccgtgtaccagctgcgggatagcaagagcagcgacaagagcgtgtgtctgttcaccgacttcgacagccagaccaacgtgtcccagagcaaggactccgacgtgtacatcaccgataagtgcgtgctggacatgcggagcatggacttcaagagcaactccgccgtggcctggtccaacaagtccgatttcgcctgcgccaacgccttcaacaacagcattatccccgaggacacattcttcccaagccccgagagcagctgcgacgtgaagctggtggaaaagagcttcgagacagacaccaacctgaacttccagaacctgagcgtgatcggcttcagaatcctgctgctgaaagtggccggctttaacctgctgatgaccctgcggctgtggtccagctaa

SEQ ID NO: 8220 - DNA, 1962 bp, synthetic construct
  source 1..1962: mol_type = other DNA
atggccttaccagtgaccgccttgctcctgccgctggccttgctgctccacgccgccaggccggcatgcgcccgcaccgaggaccgctaccgcggtaccggcggaggcggatctggcggcggaggtagcggtggcggaggatctgaattcgacatccagatgacacagagccctagcagcctgtctgccagcgtgggagacagagtgaccatcacatgcaaggccagcgaccacatcaacaactggctggcctggtatcagcagaagcctggacaggcccctaagctgctgatctacggcgctaccacactggaaacaggcgtgcccagcagattttctggcagcggctctggcaccgactacaccctgacaatatccagcctccagcctgaggacttcgccacctactactgtcagcagagctggaacaccccttggacattcggccagggcaccaagctggaaatcaagagactcgaggacctgaagaacgtgttcccacctgaggtggccgtgttcgagcctagcgaggccgagatcagccacacccagaaagccaccctcgtgtgcctggctaccggcttctaccccgaccatgtggaactgtcttggtgggtcaacggcaaagaggtgcacagcggcgtgtgtaccgacccccagccactgaaagaacagcccgccctgaacgacagccggtactgcctgagcagcagactgagagtgtccgccaccttctggcagaacccccggaaccacttcagatgccaggtgcagttctacggcctgagcgagaacgacgagtggacccaggacagagccaagcccgtgacccagatcgtgtctgccgaagcctggggcagagccgattgcggctttaccagcgagagctaccagcagggcgtgctgagcgccaccatcctgtacgagatcctgctgggcaaggccaccctgtacgccgtgctggtgtctgccctggtgctgatggctatggtcaagcggaaggacagccggggaagggccaagcgatctggatctggagcaacaaacttctcactactcaaacaagcaggtgacgtggaggagaatcccgggcctactagtgccaccatggactggatttggcgcatccttttccttgtcggcgctgctaccggcgcccattccttcgaacaagttcagcttcaacagcctggcgctgagctggtcaaacctggcgcttctgtgaagatgagctgcaaagccagcggctacgccttcagcagctactggatcaactggatgaagcagaaacccggccagggactcgaatggatcggccaaatctatcccggcgacggcgacaccaactacaacggcaagttcaagggcagagccacactgaccgccgatacctctagcagcacagcctacatgcagctgagcagcctgaccagcgaagatagcgccgtgtacttctgtgcccggtccatcacaacagtcgtgggctgcgctatggactattggggccagggaacaagcgtgaccgtgtctagtacgcgtatccagaaccctgatcctgccgtgtaccagctgcgggatagcaagagcagcgacaagagcgtgtgtctgttcaccgacttcgacagccagaccaacgtgtcccagagcaaggactccgacgtgtacatcaccgataagtgcgtgctggacatgcggagcatggacttcaagagcaactccgccgtggcctggtccaacaagtccgatttcgcctgcgccaacgccttcaacaacagcattatccccgaggacacattcttcccaagccccgagagcagctgcgacgtgaagctggtggaaaagagcttcgagacagacaccaacctgaacttccagaacctgagcgtgatcggcttcagaatcctgctgctgaaagtggccggctttaacctgctgatgaccctgcggctgtggtccagctaa

SEQ ID NO: 8221 - DNA, 1962 bp, synthetic construct
  source 1..1962: mol_type = other DNA
atggccttaccagtgaccgccttgctcctgccgctggccttgctgctccacgccgccaggccggcatgcgccagcagcgaggaccgctaccgcggtaccggcggaggcggatctggcggcggaggtagcggtggcggaggatctgaattcgacatccagatgacacagagccctagcagcctgtctgccagcgtgggagacagagtgaccatcacatgcaaggccagcgaccacatcaacaactggctggcctggtatcagcagaagcctggacaggcccctaagctgctgatctacggcgctaccacactggaaacaggcgtgcccagcagattttctggcagcggctctggcaccgactacaccctgacaatatccagcctccagcctgaggacttcgccacctactactgtcagcagagctggaacaccccttggacattcggccagggcaccaagctggaaatcaagagactcgaggacctgaagaacgtgttcccacctgaggtggccgtgttcgagcctagcgaggccgagatcagccacacccagaaagccaccctcgtgtgcctggctaccggcttctaccccgaccatgtggaactgtcttggtgggtcaacggcaaagaggtgcacagcggcgtgtgtaccgacccccagccactgaaagaacagcccgccctgaacgacagccggtactgcctgagcagcagactgagagtgtccgccaccttctggcagaacccccggaaccacttcagatgccaggtgcagttctacggcctgagcgagaacgacgagtggacccaggacagagccaagcccgtgacccagatcgtgtctgccgaagcctggggcagagccgattgcggctttaccagcgagagctaccagcagggcgtgctgagcgccaccatcctgtacgagatcctgctgggcaaggccaccctgtacgccgtgctggtgtctgccctggtgctgatggctatggtcaagcggaaggacagccggggaagggccaagcgatctggatctggagcaacaaacttctcactactcaaacaagcaggtgacgtggaggagaatcccgggcctactagtgccaccatggactggatttggcgcatccttttccttgtcggcgctgctaccggcgcccattccttcgaacaagttcagcttcaacagcctggcgctgagctggtcaaacctggcgcttctgtgaagatgagctgcaaagccagcggctacgccttcagcagctactggatcaactggatgaagcagaaacccggccagggactcgaatggatcggccaaatctatcccggcgacggcgacaccaactacaacggcaagttcaagggcagagccacactgaccgccgatacctctagcagcacagcctacatgcagctgagcagcctgaccagcgaagatagcgccgtgtacttctgtgcccggtccatcacaacagtcgtgggctgcgctatggactattggggccagggaacaagcgtgaccgtgtctagtacgcgtatccagaaccctgatcctgccgtgtaccagctgcgggatagcaagagcagcgacaagagcgtgtgtctgttcaccgacttcgacagccagaccaacgtgtcccagagcaaggactccgacgtgtacatcaccgataagtgcgtgctggacatgcggagcatggacttcaagagcaactccgccgtggcctggtccaacaagtccgatttcgcctgcgccaacgccttcaacaacagcattatccccgaggacacattcttcccaagccccgagagcagctgcgacgtgaagctggtggaaaagagcttcgagacagacaccaacctgaacttccagaacctgagcgtgatcggcttcagaatcctgctgctgaaagtggccggctttaacctgctgatgaccctgcggctgtggtccagctaa

SEQ ID NO: 8222 - DNA, 1962 bp, synthetic construct
  source 1..1962: mol_type = other DNA
atggccttaccagtgaccgccttgctcctgccgctggccttgctgctccacgccgccaggccggcatgcgcccacagcgaggaccgctaccgcggtaccggcggaggcggatctggcggcggaggtagcggtggcggaggatctgaattcgacatccagatgacacagagccctagcagcctgtctgccagcgtgggagacagagtgaccatcacatgcaaggccagcgaccacatcaacaactggctggcctggtatcagcagaagcctggacaggcccctaagctgctgatctacggcgctaccacactggaaacaggcgtgcccagcagattttctggcagcggctctggcaccgactacaccctgacaatatccagcctccagcctgaggacttcgccacctactactgtcagcagagctggaacaccccttggacattcggccagggcaccaagctggaaatcaagagactcgaggacctgaagaacgtgttcccacctgaggtggccgtgttcgagcctagcgaggccgagatcagccacacccagaaagccaccctcgtgtgcctggctaccggcttctaccccgaccatgtggaactgtcttggtgggtcaacggcaaagaggtgcacagcggcgtgtgtaccgacccccagccactgaaagaacagcccgccctgaacgacagccggtactgcctgagcagcagactgagagtgtccgccaccttctggcagaacccccggaaccacttcagatgccaggtgcagttctacggcctgagcgagaacgacgagtggacccaggacagagccaagcccgtgacccagatcgtgtctgccgaagcctggggcagagccgattgcggctttaccagcgagagctaccagcagggcgtgctgagcgccaccatcctgtacgagatcctgctgggcaaggccaccctgtacgccgtgctggtgtctgccctggtgctgatggctatggtcaagcggaaggacagccggggaagggccaagcgatctggatctggagcaacaaacttctcactactcaaacaagcaggtgacgtggaggagaatcccgggcctactagtgccaccatggactggatttggcgcatccttttccttgtcggcgctgctaccggcgcccattccttcgaacaagttcagcttcaacagcctggcgctgagctggtcaaacctggcgcttctgtgaagatgagctgcaaagccagcggctacgccttcagcagctactggatcaactggatgaagcagaaacccggccagggactcgaatggatcggccaaatctatcccggcgacggcgacaccaactacaacggcaagttcaagggcagagccacactgaccgccgatacctctagcagcacagcctacatgcagctgagcagcctgaccagcgaagatagcgccgtgtacttctgtgcccggtccatcacaacagtcgtgggctgcgctatggactattggggccagggaacaagcgtgaccgtgtctagtacgcgtatccagaaccctgatcctgccgtgtaccagctgcgggatagcaagagcagcgacaagagcgtgtgtctgttcaccgacttcgacagccagaccaacgtgtcccagagcaaggactccgacgtgtacatcaccgataagtgcgtgctggacatgcggagcatggacttcaagagcaactccgccgtggcctggtccaacaagtccgatttcgcctgcgccaacgccttcaacaacagcattatccccgaggacacattcttcccaagccccgagagcagctgcgacgtgaagctggtggaaaagagcttcgagacagacaccaacctgaacttccagaacctgagcgtgatcggcttcagaatcctgctgctgaaagtggccggctttaacctgctgatgaccctgcggctgtggtccagctaa

SEQ ID NO: 8223 - DNA, 1962 bp, synthetic construct
  source 1..1962: mol_type = other DNA
atggccttaccagtgaccgccttgctcctgccgctggccttgctgctccacgccgccaggccggcatgcgccgacagcgaggaccgctaccgcggtaccggcggaggcggatctggcggcggaggtagcggtggcggaggatctgaattcgacatccagatgacacagagccctagcagcctgtctgccagcgtgggagacagagtgaccatcacatgcaaggccagcgaccacatcaacaactggctggcctggtatcagcagaagcctggacaggcccctaagctgctgatctacggcgctaccacactggaaacaggcgtgcccagcagattttctggcagcggctctggcaccgactacaccctgacaatatccagcctccagcctgaggacttcgccacctactactgtcagcagagctggaacaccccttggacattcggccagggcaccaagctggaaatcaagagactcgaggacctgaagaacgtgttcccacctgaggtggccgtgttcgagcctagcgaggccgagatcagccacacccagaaagccaccctcgtgtgcctggctaccggcttctaccccgaccatgtggaactgtcttggtgggtcaacggcaaagaggtgcacagcggcgtgtgtaccgacccccagccactgaaagaacagcccgccctgaacgacagccggtactgcctgagcagcagactgagagtgtccgccaccttctggcagaacccccggaaccacttcagatgccaggtgcagttctacggcctgagcgagaacgacgagtggacccaggacagagccaagcccgtgacccagatcgtgtctgccgaagcctggggcagagccgattgcggctttaccagcgagagctaccagcagggcgtgctgagcgccaccatcctgtacgagatcctgctgggcaaggccaccctgtacgccgtgctggtgtctgccctggtgctgatggctatggtcaagcggaaggacagccggggaagggccaagcgatctggatctggagcaacaaacttctcactactcaaacaagcaggtgacgtggaggagaatcccgggcctactagtgccaccatggactggatttggcgcatccttttccttgtcggcgctgctaccggcgcccattccttcgaacaagttcagcttcaacagcctggcgctgagctggtcaaacctggcgcttctgtgaagatgagctgcaaagccagcggctacgccttcagcagctactggatcaactggatgaagcagaaacccggccagggactcgaatggatcggccaaatctatcccggcgacggcgacaccaactacaacggcaagttcaagggcagagccacactgaccgccgatacctctagcagcacagcctacatgcagctgagcagcctgaccagcgaagatagcgccgtgtacttctgtgcccggtccatcacaacagtcgtgggctgcgctatggactattggggccagggaacaagcgtgaccgtgtctagtacgcgtatccagaaccctgatcctgccgtgtaccagctgcgggatagcaagagcagcgacaagagcgtgtgtctgttcaccgacttcgacagccagaccaacgtgtcccagagcaaggactccgacgtgtacatcaccgataagtgcgtgctggacatgcggagcatggacttcaagagcaactccgccgtggcctggtccaacaagtccgatttcgcctgcgccaacgccttcaacaacagcattatccccgaggacacattcttcccaagccccgagagcagctgcgacgtgaagctggtggaaaagagcttcgagacagacaccaacctgaacttccagaacctgagcgtgatcggcttcagaatcctgctgctgaaagtggccggctttaacctgctgatgaccctgcggctgtggtccagctaa

SEQ ID NO: 8224 - DNA, 1962 bp, synthetic construct
  source 1..1962: mol_type = other DNA
atggccttaccagtgaccgccttgctcctgccgctggccttgctgctccacgccgccaggccggcatgcgccttcagcgaggaccgctaccgcggtaccggcggaggcggatctggcggcggaggtagcggtggcggaggatctgaattcgacatccagatgacacagagccctagcagcctgtctgccagcgtgggagacagagtgaccatcacatgcaaggccagcgaccacatcaacaactggctggcctggtatcagcagaagcctggacaggcccctaagctgctgatctacggcgctaccacactggaaacaggcgtgcccagcagattttctggcagcggctctggcaccgactacaccctgacaatatccagcctccagcctgaggacttcgccacctactactgtcagcagagctggaacaccccttggacattcggccagggcaccaagctggaaatcaagagactcgaggacctgaagaacgtgttcccacctgaggtggccgtgttcgagcctagcgaggccgagatcagccacacccagaaagccaccctcgtgtgcctggctaccggcttctaccccgaccatgtggaactgtcttggtgggtcaacggcaaagaggtgcacagcggcgtgtgtaccgacccccagccactgaaagaacagcccgccctgaacgacagccggtactgcctgagcagcagactgagagtgtccgccaccttctggcagaacccccggaaccacttcagatgccaggtgcagttctacggcctgagcgagaacgacgagtggacccaggacagagccaagcccgtgacccagatcgtgtctgccgaagcctggggcagagccgattgcggctttaccagcgagagctaccagcagggcgtgctgagcgccaccatcctgtacgagatcctgctgggcaaggccaccctgtacgccgtgctggtgtctgccctggtgctgatggctatggtcaagcggaaggacagccggggaagggccaagcgatctggatctggagcaacaaacttctcactactcaaacaagcaggtgacgtggaggagaatcccgggcctactagtgccaccatggactggatttggcgcatccttttccttgtcggcgctgctaccggcgcccattccttcgaacaagttcagcttcaacagcctggcgctgagctggtcaaacctggcgcttctgtgaagatgagctgcaaagccagcggctacgccttcagcagctactggatcaactggatgaagcagaaacccggccagggactcgaatggatcggccaaatctatcccggcgacggcgacaccaactacaacggcaagttcaagggcagagccacactgaccgccgatacctctagcagcacagcctacatgcagctgagcagcctgaccagcgaagatagcgccgtgtacttctgtgcccggtccatcacaacagtcgtgggctgcgctatggactattggggccagggaacaagcgtgaccgtgtctagtacgcgtatccagaaccctgatcctgccgtgtaccagctgcgggatagcaagagcagcgacaagagcgtgtgtctgttcaccgacttcgacagccagaccaacgtgtcccagagcaaggactccgacgtgtacatcaccgataagtgcgtgctggacatgcggagcatggacttcaagagcaactccgccgtggcctggtccaacaagtccgatttcgcctgcgccaacgccttcaacaacagcattatccccgaggacacattcttcccaagccccgagagcagctgcgacgtgaagctggtggaaaagagcttcgagacagacaccaacctgaacttccagaacctgagcgtgatcggcttcagaatcctgctgctgaaagtggccggctttaacctgctgatgaccctgcggctgtggtccagctaa

SEQ ID NO: 8225 - DNA, 1962 bp, synthetic construct
  source 1..1962: mol_type = other DNA
atggccttaccagtgaccgccttgctcctgccgctggccttgctgctccacgccgccaggccggcatgcgcccgcagcgaggaccgcttccgcggtaccggcggaggcggatctggcggcggaggtagcggtggcggaggatctgaattcgacatccagatgacacagagccctagcagcctgtctgccagcgtgggagacagagtgaccatcacatgcaaggccagcgaccacatcaacaactggctggcctggtatcagcagaagcctggacaggcccctaagctgctgatctacggcgctaccacactggaaacaggcgtgcccagcagattttctggcagcggctctggcaccgactacaccctgacaatatccagcctccagcctgaggacttcgccacctactactgtcagcagagctggaacaccccttggacattcggccagggcaccaagctggaaatcaagagactcgaggacctgaagaacgtgttcccacctgaggtggccgtgttcgagcctagcgaggccgagatcagccacacccagaaagccaccctcgtgtgcctggctaccggcttctaccccgaccatgtggaactgtcttggtgggtcaacggcaaagaggtgcacagcggcgtgtgtaccgacccccagccactgaaagaacagcccgccctgaacgacagccggtactgcctgagcagcagactgagagtgtccgccaccttctggcagaacccccggaaccacttcagatgccaggtgcagttctacggcctgagcgagaacgacgagtggacccaggacagagccaagcccgtgacccagatcgtgtctgccgaagcctggggcagagccgattgcggctttaccagcgagagctaccagcagggcgtgctgagcgccaccatcctgtacgagatcctgctgggcaaggccaccctgtacgccgtgctggtgtctgccctggtgctgatggctatggtcaagcggaaggacagccggggaagggccaagcgatctggatctggagcaacaaacttctcactactcaaacaagcaggtgacgtggaggagaatcccgggcctactagtgccaccatggactggatttggcgcatccttttccttgtcggcgctgctaccggcgcccattccttcgaacaagttcagcttcaacagcctggcgctgagctggtcaaacctggcgcttctgtgaagatgagctgcaaagccagcggctacgccttcagcagctactggatcaactggatgaagcagaaacccggccagggactcgaatggatcggccaaatctatcccggcgacggcgacaccaactacaacggcaagttcaagggcagagccacactgaccgccgatacctctagcagcacagcctacatgcagctgagcagcctgaccagcgaagatagcgccgtgtacttctgtgcccggtccatcacaacagtcgtgggctgcgctatggactattggggccagggaacaagcgtgaccgtgtctagtacgcgtatccagaaccctgatcctgccgtgtaccagctgcgggatagcaagagcagcgacaagagcgtgtgtctgttcaccgacttcgacagccagaccaacgtgtcccagagcaaggactccgacgtgtacatcaccgataagtgcgtgctggacatgcggagcatggacttcaagagcaactccgccgtggcctggtccaacaagtccgatttcgcctgcgccaacgccttcaacaacagcattatccccgaggacacattcttcccaagccccgagagcagctgcgacgtgaagctggtggaaaagagcttcgagacagacaccaacctgaacttccagaacctgagcgtgatcggcttcagaatcctgctgctgaaagtggccggctttaacctgctgatgaccctgcggctgtggtccagctaa

SEQ ID NO: 8226 - DNA, 1962 bp, synthetic construct
  source 1..1962: mol_type = other DNA
atggccttaccagtgaccgccttgctcctgccgctggccttgctgctccacgccgccaggccggcatgcgcccgcagcgaggaccgccaccgcggtaccggcggaggcggatctggcggcggaggtagcggtggcggaggatctgaattcgacatccagatgacacagagccctagcagcctgtctgccagcgtgggagacagagtgaccatcacatgcaaggccagcgaccacatcaacaactggctggcctggtatcagcagaagcctggacaggcccctaagctgctgatctacggcgctaccacactggaaacaggcgtgcccagcagattttctggcagcggctctggcaccgactacaccctgacaatatccagcctccagcctgaggacttcgccacctactactgtcagcagagctggaacaccccttggacattcggccagggcaccaagctggaaatcaagagactcgaggacctgaagaacgtgttcccacctgaggtggccgtgttcgagcctagcgaggccgagatcagccacacccagaaagccaccctcgtgtgcctggctaccggcttctaccccgaccatgtggaactgtcttggtgggtcaacggcaaagaggtgcacagcggcgtgtgtaccgacccccagccactgaaagaacagcccgccctgaacgacagccggtactgcctgagcagcagactgagagtgtccgccaccttctggcagaacccccggaaccacttcagatgccaggtgcagttctacggcctgagcgagaacgacgagtggacccaggacagagccaagcccgtgacccagatcgtgtctgccgaagcctggggcagagccgattgcggctttaccagcgagagctaccagcagggcgtgctgagcgccaccatcctgtacgagatcctgctgggcaaggccaccctgtacgccgtgctggtgtctgccctggtgctgatggctatggtcaagcggaaggacagccggggaagggccaagcgatctggatctggagcaacaaacttctcactactcaaacaagcaggtgacgtggaggagaatcccgggcctactagtgccaccatggactggatttggcgcatccttttccttgtcggcgctgctaccggcgcccattccttcgaacaagttcagcttcaacagcctggcgctgagctggtcaaacctggcgcttctgtgaagatgagctgcaaagccagcggctacgccttcagcagctactggatcaactggatgaagcagaaacccggccagggactcgaatggatcggccaaatctatcccggcgacggcgacaccaactacaacggcaagttcaagggcagagccacactgaccgccgatacctctagcagcacagcctacatgcagctgagcagcctgaccagcgaagatagcgccgtgtacttctgtgcccggtccatcacaacagtcgtgggctgcgctatggactattggggccagggaacaagcgtgaccgtgtctagtacgcgtatccagaaccctgatcctgccgtgtaccagctgcgggatagcaagagcagcgacaagagcgtgtgtctgttcaccgacttcgacagccagaccaacgtgtcccagagcaaggactccgacgtgtacatcaccgataagtgcgtgctggacatgcggagcatggacttcaagagcaactccgccgtggcctggtccaacaagtccgatttcgcctgcgccaacgccttcaacaacagcattatccccgaggacacattcttcccaagccccgagagcagctgcgacgtgaagctggtggaaaagagcttcgagacagacaccaacctgaacttccagaacctgagcgtgatcggcttcagaatcctgctgctgaaagtggccggctttaacctgctgatgaccctgcggctgtggtccagctaa

SEQ ID NO: 8227 - DNA, 1959 bp, synthetic construct
  source 1..1959: mol_type = other DNA
atggccttaccagtgaccgccttgctcctgccgctggccttgctgctccacgccgccaggccggcatgccgcagcgaggaccgcttcaagggtaccggcggaggcggatctggcggcggaggtagcggtggcggaggatctgaattcgacatccagatgacacagagccctagcagcctgtctgccagcgtgggagacagagtgaccatcacatgcaaggccagcgaccacatcaacaactggctggcctggtatcagcagaagcctggacaggcccctaagctgctgatctacggcgctaccacactggaaacaggcgtgcccagcagattttctggcagcggctctggcaccgactacaccctgacaatatccagcctccagcctgaggacttcgccacctactactgtcagcagagctggaacaccccttggacattcggccagggcaccaagctggaaatcaagagactcgaggacctgaagaacgtgttcccacctgaggtggccgtgttcgagcctagcgaggccgagatcagccacacccagaaagccaccctcgtgtgcctggctaccggcttctaccccgaccatgtggaactgtcttggtgggtcaacggcaaagaggtgcacagcggcgtgtgtaccgacccccagccactgaaagaacagcccgccctgaacgacagccggtactgcctgagcagcagactgagagtgtccgccaccttctggcagaacccccggaaccacttcagatgccaggtgcagttctacggcctgagcgagaacgacgagtggacccaggacagagccaagcccgtgacccagatcgtgtctgccgaagcctggggcagagccgattgcggctttaccagcgagagctaccagcagggcgtgctgagcgccaccatcctgtacgagatcctgctgggcaaggccaccctgtacgccgtgctggtgtctgccctggtgctgatggctatggtcaagcggaaggacagccggggaagggccaagcgatctggatctggagcaacaaacttctcactactcaaacaagcaggtgacgtggaggagaatcccgggcctactagtgccaccatggactggatttggcgcatccttttccttgtcggcgctgctaccggcgcccattccttcgaacaagttcagcttcaacagcctggcgctgagctggtcaaacctggcgcttctgtgaagatgagctgcaaagccagcggctacgccttcagcagctactggatcaactggatgaagcagaaacccggccagggactcgaatggatcggccaaatctatcccggcgacggcgacaccaactacaacggcaagttcaagggcagagccacactgaccgccgatacctctagcagcacagcctacatgcagctgagcagcctgaccagcgaagatagcgccgtgtacttctgtgcccggtccatcacaacagtcgtgggctgcgctatggactattggggccagggaacaagcgtgaccgtgtctagtacgcgtatccagaaccctgatcctgccgtgtaccagctgcgggatagcaagagcagcgacaagagcgtgtgtctgttcaccgacttcgacagccagaccaacgtgtcccagagcaaggactccgacgtgtacatcaccgataagtgcgtgctggacatgcggagcatggacttcaagagcaactccgccgtggcctggtccaacaagtccgatttcgcctgcgccaacgccttcaacaacagcattatccccgaggacacattcttcccaagccccgagagcagctgcgacgtgaagctggtggaaaagagcttcgagacagacaccaacctgaacttccagaacctgagcgtgatcggcttcagaatcctgctgctgaaagtggccggctttaacctgctgatgaccctgcggctgtggtccagctaa

SEQ ID NO: 8228 - DNA, 1959 bp, synthetic construct
  source 1..1959: mol_type = other DNA
atggccttaccagtgaccgccttgctcctgccgctggccttgctgctccacgccgccaggccggcatgccgcagcgaggaccgccacaagggtaccggcggaggcggatctggcggcggaggtagcggtggcggaggatctgaattcgacatccagatgacacagagccctagcagcctgtctgccagcgtgggagacagagtgaccatcacatgcaaggccagcgaccacatcaacaactggctggcctggtatcagcagaagcctggacaggcccctaagctgctgatctacggcgctaccacactggaaacaggcgtgcccagcagattttctggcagcggctctggcaccgactacaccctgacaatatccagcctccagcctgaggacttcgccacctactactgtcagcagagctggaacaccccttggacattcggccagggcaccaagctggaaatcaagagactcgaggacctgaagaacgtgttcccacctgaggtggccgtgttcgagcctagcgaggccgagatcagccacacccagaaagccaccctcgtgtgcctggctaccggcttctaccccgaccatgtggaactgtcttggtgggtcaacggcaaagaggtgcacagcggcgtgtgtaccgacccccagccactgaaagaacagcccgccctgaacgacagccggtactgcctgagcagcagactgagagtgtccgccaccttctggcagaacccccggaaccacttcagatgccaggtgcagttctacggcctgagcgagaacgacgagtggacccaggacagagccaagcccgtgacccagatcgtgtctgccgaagcctggggcagagccgattgcggctttaccagcgagagctaccagcagggcgtgctgagcgccaccatcctgtacgagatcctgctgggcaaggccaccctgtacgccgtgctggtgtctgccctggtgctgatggctatggtcaagcggaaggacagccggggaagggccaagcgatctggatctggagcaacaaacttctcactactcaaacaagcaggtgacgtggaggagaatcccgggcctactagtgccaccatggactggatttggcgcatccttttccttgtcggcgctgctaccggcgcccattccttcgaacaagttcagcttcaacagcctggcgctgagctggtcaaacctggcgcttctgtgaagatgagctgcaaagccagcggctacgccttcagcagctactggatcaactggatgaagcagaaacccggccagggactcgaatggatcggccaaatctatcccggcgacggcgacaccaactacaacggcaagttcaagggcagagccacactgaccgccgatacctctagcagcacagcctacatgcagctgagcagcctgaccagcgaagatagcgccgtgtacttctgtgcccggtccatcacaacagtcgtgggctgcgctatggactattggggccagggaacaagcgtgaccgtgtctagtacgcgtatccagaaccctgatcctgccgtgtaccagctgcgggatagcaagagcagcgacaagagcgtgtgtctgttcaccgacttcgacagccagaccaacgtgtcccagagcaaggactccgacgtgtacatcaccgataagtgcgtgctggacatgcggagcatggacttcaagagcaactccgccgtggcctggtccaacaagtccgatttcgcctgcgccaacgccttcaacaacagcattatccccgaggacacattcttcccaagccccgagagcagctgcgacgtgaagctggtggaaaagagcttcgagacagacaccaacctgaacttccagaacctgagcgtgatcggcttcagaatcctgctgctgaaagtggccggctttaacctgctgatgaccctgcggctgtggtccagctaa

SEQ ID NO: 8229 - DNA, 1959 bp, synthetic construct; identical to SEQ ID NO: 8076
  source 1..1959: mol_type = other DNA

SEQ ID NO: 8230 - DNA, 1959 bp, synthetic construct; identical to SEQ ID NO: 8079
  source 1..1959: mol_type = other DNA

SEQ ID NO: 8231 - DNA, 1959 bp, synthetic construct; identical to SEQ ID NO: 8080
  source 1..1959: mol_type = other DNA

SEQ ID NO: 8232 - DNA, 1959 bp, synthetic construct
  source 1..1959: mol_type = other DNA
atggccttaccagtgaccgccttgctcctgccgctggccttgctgctccacgccgccaggccggcatgccgcagcgagtggcgctacaagggtaccggcggaggcggatctggcggcggaggtagcggtggcggaggatctgaattcgacatccagatgacacagagccctagcagcctgtctgccagcgtgggagacagagtgaccatcacatgcaaggccagcgaccacatcaacaactggctggcctggtatcagcagaagcctggacaggcccctaagctgctgatctacggcgctaccacactggaaacaggcgtgcccagcagattttctggcagcggctctggcaccgactacaccctgacaatatccagcctccagcctgaggacttcgccacctactactgtcagcagagctggaacaccccttggacattcggccagggcaccaagctggaaatcaagagactcgaggacctgaagaacgtgttcccacctgaggtggccgtgttcgagcctagcgaggccgagatcagccacacccagaaagccaccctcgtgtgcctggctaccggcttctaccccgaccatgtggaactgtcttggtgggtcaacggcaaagaggtgcacagcggcgtgtgtaccgacccccagccactgaaagaacagcccgccctgaacgacagccggtactgcctgagcagcagactgagagtgtccgccaccttctggcagaacccccggaaccacttcagatgccaggtgcagttctacggcctgagcgagaacgacgagtggacccaggacagagccaagcccgtgacccagatcgtgtctgccgaagcctggggcagagccgattgcggctttaccagcgagagctaccagcagggcgtgctgagcgccaccatcctgtacgagatcctgctgggcaaggccaccctgtacgccgtgctggtgtctgccctggtgctgatggctatggtcaagcggaaggacagccggggaagggccaagcgatctggatctggagcaacaaacttctcactactcaaacaagcaggtgacgtggaggagaatcccgggcctactagtgccaccatggactggatttggcgcatccttttccttgtcggcgctgctaccggcgcccattccttcgaacaagttcagcttcaacagcctggcgctgagctggtcaaacctggcgcttctgtgaagatgagctgcaaagccagcggctacgccttcagcagctactggatcaactggatgaagcagaaacccggccagggactcgaatggatcggccaaatctatcccggcgacggcgacaccaactacaacggcaagttcaagggcagagccacactgaccgccgatacctctagcagcacagcctacatgcagctgagcagcctgaccagcgaagatagcgccgtgtacttctgtgcccggtccatcacaacagtcgtgggctgcgctatggactattggggccagggaacaagcgtgaccgtgtctagtacgcgtatccagaaccctgatcctgccgtgtaccagctgcgggatagcaagagcagcgacaagagcgtgtgtctgttcaccgacttcgacagccagaccaacgtgtcccagagcaaggactccgacgtgtacatcaccgataagtgcgtgctggacatgcggagcatggacttcaagagcaactccgccgtggcctggtccaacaagtccgatttcgcctgcgccaacgccttcaacaacagcattatccccgaggacacattcttcccaagccccgagagcagctgcgacgtgaagctggtggaaaagagcttcgagacagacaccaacctgaacttccagaacctgagcgtgatcggcttcagaatcctgctgctgaaagtggccggctttaacctgctgatgaccctgcggctgtggtccagctaa

SEQ ID NO: 8233 - DNA, 1959 bp, synthetic construct
  source 1..1959: mol_type = other DNA
atggccttaccagtgaccgccttgctcctgccgctggccttgctgctccacgccgccaggccggcatgccgcagcgagtaccgctacaagggtaccggcggaggcggatctggcggcggaggtagcggtggcggaggatctgaattcgacatccagatgacacagagccctagcagcctgtctgccagcgtgggagacagagtgaccatcacatgcaaggccagcgaccacatcaacaactggctggcctggtatcagcagaagcctggacaggcccctaagctgctgatctacggcgctaccacactggaaacaggcgtgcccagcagattttctggcagcggctctggcaccgactacaccctgacaatatccagcctccagcctgaggacttcgccacctactactgtcagcagagctggaacaccccttggacattcggccagggcaccaagctggaaatcaagagactcgaggacctgaagaacgtgttcccacctgaggtggccgtgttcgagcctagcgaggccgagatcagccacacccagaaagccaccctcgtgtgcctggctaccggcttctaccccgaccatgtggaactgtcttggtgggtcaacggcaaagaggtgcacagcggcgtgtgtaccgacccccagccactgaaagaacagcccgccctgaacgacagccggtactgcctgagcagcagactgagagtgtccgccaccttctggcagaacccccggaaccacttcagatgccaggtgcagttctacggcctgagcgagaacgacgagtggacccaggacagagccaagcccgtgacccagatcgtgtctgccgaagcctggggcagagccgattgcggctttaccagcgagagctaccagcagggcgtgctgagcgccaccatcctgtacgagatcctgctgggcaaggccaccctgtacgccgtgctggtgtctgccctggtgctgatggctatggtcaagcggaaggacagccggggaagggccaagcgatctggatctggagcaacaaacttctcactactcaaacaagcaggtgacgtggaggagaatcccgggcctactagtgccaccatggactggatttggcgcatccttttccttgtcggcgctgctaccggcgcccattccttcgaacaagttcagcttcaacagcctggcgctgagctggtcaaacctggcgcttctgtgaagatgagctgcaaagccagcggctacgccttcagcagctactggatcaactggatgaagcagaaacccggccagggactcgaatggatcggccaaatctatcccggcgacggcgacaccaactacaacggcaagttcaagggcagagccacactgaccgccgatacctctagcagcacagcctacatgcagctgagcagcctgaccagcgaagatagcgccgtgtacttctgtgcccggtccatcacaacagtcgtgggctgcgctatggactattggggccagggaacaagcgtgaccgtgtctagtacgcgtatccagaaccctgatcctgccgtgtaccagctgcgggatagcaagagcagcgacaagagcgtgtgtctgttcaccgacttcgacagccagaccaacgtgtcccagagcaaggactccgacgtgtacatcaccgataagtgcgtgctggacatgcggagcatggacttcaagagcaactccgccgtggcctggtccaacaagtccgatttcgcctgcgccaacgccttcaacaacagcattatccccgaggacacattcttcccaagccccgagagcagctgcgacgtgaagctggtggaaaagagcttcgagacagacaccaacctgaacttccagaacctgagcgtgatcggcttcagaatcctgctgctgaaagtggccggctttaacctgctgatgaccctgcggctgtggtccagctaa

SEQ ID NO: 8234 - DNA, 1959 bp, synthetic construct
  source 1..1959: mol_type = other DNA
atggccttaccagtgaccgccttgctcctgccgctggccttgctgctccacgccgccaggccggcatgccgcagcgagcgccgctacaagggtaccggcggaggcggatctggcggcggaggtagcggtggcggaggatctgaattcgacatccagatgacacagagccctagcagcctgtctgccagcgtgggagacagagtgaccatcacatgcaaggccagcgaccacatcaacaactggctggcctggtatcagcagaagcctggacaggcccctaagctgctgatctacggcgctaccacactggaaacaggcgtgcccagcagattttctggcagcggctctggcaccgactacaccctgacaatatccagcctccagcctgaggacttcgccacctactactgtcagcagagctggaacaccccttggacattcggccagggcaccaagctggaaatcaagagactcgaggacctgaagaacgtgttcccacctgaggtggccgtgttcgagcctagcgaggccgagatcagccacacccagaaagccaccctcgtgtgcctggctaccggcttctaccccgaccatgtggaactgtcttggtgggtcaacggcaaagaggtgcacagcggcgtgtgtaccgacccccagccactgaaagaacagcccgccctgaacgacagccggtactgcctgagcagcagactgagagtgtccgccaccttctggcagaacccccggaaccacttcagatgccaggtgcagttctacggcctgagcgagaacgacgagtggacccaggacagagccaagcccgtgacccagatcgtgtctgccgaagcctggggcagagccgattgcggctttaccagcgagagctaccagcagggcgtgctgagcgccaccatcctgtacgagatcctgctgggcaaggccaccctgtacgccgtgctggtgtctgccctggtgctgatggctatggtcaagcggaaggacagccggggaagggccaagcgatctggatctggagcaacaaacttctcactactcaaacaagcaggtgacgtggaggagaatcccgggcctactagtgccaccatggactggatttggcgcatccttttccttgtcggcgctgctaccggcgcccattccttcgaacaagttcagcttcaacagcctggcgctgagctggtcaaacctggcgcttctgtgaagatgagctgcaaagccagcggctacgccttcagcagctactggatcaactggatgaagcagaaacccggccagggactcgaatggatcggccaaatctatcccggcgacggcgacaccaactacaacggcaagttcaagggcagagccacactgaccgccgatacctctagcagcacagcctacatgcagctgagcagcctgaccagcgaagatagcgccgtgtacttctgtgcccggtccatcacaacagtcgtgggctgcgctatggactattggggccagggaacaagcgtgaccgtgtctagtacgcgtatccagaaccctgatcctgccgtgtaccagctgcgggatagcaagagcagcgacaagagcgtgtgtctgttcaccgacttcgacagccagaccaacgtgtcccagagcaaggactccgacgtgtacatcaccgataagtgcgtgctggacatgcggagcatggacttcaagagcaactccgccgtggcctggtccaacaagtccgatttcgcctgcgccaacgccttcaacaacagcattatccccgaggacacattcttcccaagccccgagagcagctgcgacgtgaagctggtggaaaagagcttcgagacagacaccaacctgaacttccagaacctgagcgtgatcggcttcagaatcctgctgctgaaagtggccggctttaacctgctgatgaccctgcggctgtggtccagctaa

SEQ ID NO: 8235 - DNA, 1959 bp, synthetic construct
  source 1..1959: mol_type = other DNA
atggccttaccagtgaccgccttgctcctgccgctggccttgctgctccacgccgccaggccggcatgccgcagcgaggtgcgctacaagggtaccggcggaggcggatctggcggcggaggtagcggtggcggaggatctgaattcgacatccagatgacacagagccctagcagcctgtctgccagcgtgggagacagagtgaccatcacatgcaaggccagcgaccacatcaacaactggctggcctggtatcagcagaagcctggacaggcccctaagctgctgatctacggcgctaccacactggaaacaggcgtgcccagcagattttctggcagcggctctggcaccgactacaccctgacaatatccagcctccagcctgaggacttcgccacctactactgtcagcagagctggaacaccccttggacattcggccagggcaccaagctggaaatcaagagactcgaggacctgaagaacgtgttcccacctgaggtggccgtgttcgagcctagcgaggccgagatcagccacacccagaaagccaccctcgtgtgcctggctaccggcttctaccccgaccatgtggaactgtcttggtgggtcaacggcaaagaggtgcacagcggcgtgtgtaccgacccccagccactgaaagaacagcccgccctgaacgacagccggtactgcctgagcagcagactgagagtgtccgccaccttctggcagaacccccggaaccacttcagatgccaggtgcagttctacggcctgagcgagaacgacgagtggacccaggacagagccaagcccgtgacccagatcgtgtctgccgaagcctggggcagagccgattgcggctttaccagcgagagctaccagcagggcgtgctgagcgccaccatcctgtacgagatcctgctgggcaaggccaccctgtacgccgtgctggtgtctgccctggtgctgatggctatggtcaagcggaaggacagccggggaagggccaagcgatctggatctggagcaacaaacttctcactactcaaacaagcaggtgacgtggaggagaatcccgggcctactagtgccaccatggactggatttggcgcatccttttccttgtcggcgctgctaccggcgcccattccttcgaacaagttcagcttcaacagcctggcgctgagctggtcaaacctggcgcttctgtgaagatgagctgcaaagccagcggctacgccttcagcagctactggatcaactggatgaagcagaaacccggccagggactcgaatggatcggccaaatctatcccggcgacggcgacaccaactacaacggcaagttcaagggcagagccacactgaccgccgatacctctagcagcacagcctacatgcagctgagcagcctgaccagcgaagatagcgccgtgtacttctgtgcccggtccatcacaacagtcgtgggctgcgctatggactattggggccagggaacaagcgtgaccgtgtctagtacgcgtatccagaaccctgatcctgccgtgtaccagctgcgggatagcaagagcagcgacaagagcgtgtgtctgttcaccgacttcgacagccagaccaacgtgtcccagagcaaggactccgacgtgtacatcaccgataagtgcgtgctggacatgcggagcatggacttcaagagcaactccgccgtggcctggtccaacaagtccgatttcgcctgcgccaacgccttcaacaacagcattatccccgaggacacattcttcccaagccccgagagcagctgcgacgtgaagctggtggaaaagagcttcgagacagacaccaacctgaacttccagaacctgagcgtgatcggcttcagaatcctgctgctgaaagtggccggctttaacctgctgatgaccctgcggctgtggtccagctaa

SEQ ID NO: 8236 - DNA, 1959 bp, synthetic construct
  source 1..1959: mol_type = other DNA
atggccttaccagtgaccgccttgctcctgccgctggccttgctgctccacgccgccaggccggcatgccgcatcgaggaccgctacaagggtaccggcggaggcggatctggcggcggaggtagcggtggcggaggatctgaattcgacatccagatgacacagagccctagcagcctgtctgccagcgtgggagacagagtgaccatcacatgcaaggccagcgaccacatcaacaactggctggcctggtatcagcagaagcctggacaggcccctaagctgctgatctacggcgctaccacactggaaacaggcgtgcccagcagattttctggcagcggctctggcaccgactacaccctgacaatatccagcctccagcctgaggacttcgccacctactactgtcagcagagctggaacaccccttggacattcggccagggcaccaagctggaaatcaagagactcgaggacctgaagaacgtgttcccacctgaggtggccgtgttcgagcctagcgaggccgagatcagccacacccagaaagccaccctcgtgtgcctggctaccggcttctaccccgaccatgtggaactgtcttggtgggtcaacggcaaagaggtgcacagcggcgtgtgtaccgacccccagccactgaaagaacagcccgccctgaacgacagccggtactgcctgagcagcagactgagagtgtccgccaccttctggcagaacccccggaaccacttcagatgccaggtgcagttctacggcctgagcgagaacgacgagtggacccaggacagagccaagcccgtgacccagatcgtgtctgccgaagcctggggcagagccgattgcggctttaccagcgagagctaccagcagggcgtgctgagcgccaccatcctgtacgagatcctgctgggcaaggccaccctgtacgccgtgctggtgtctgccctggtgctgatggctatggtcaagcggaaggacagccggggaagggccaagcgatctggatctggagcaacaaacttctcactactcaaacaagcaggtgacgtggaggagaatcccgggcctactagtgccaccatggactggatttggcgcatccttttccttgtcggcgctgctaccggcgcccattccttcgaacaagttcagcttcaacagcctggcgctgagctggtcaaacctggcgcttctgtgaagatgagctgcaaagccagcggctacgccttcagcagctactggatcaactggatgaagcagaaacccggccagggactcgaatggatcggccaaatctatcccggcgacggcgacaccaactacaacggcaagttcaagggcagagccacactgaccgccgatacctctagcagcacagcctacatgcagctgagcagcctgaccagcgaagatagcgccgtgtacttctgtgcccggtccatcacaacagtcgtgggctgcgctatggactattggggccagggaacaagcgtgaccgtgtctagtacgcgtatccagaaccctgatcctgccgtgtaccagctgcgggatagcaagagcagcgacaagagcgtgtgtctgttcaccgacttcgacagccagaccaacgtgtcccagagcaaggactccgacgtgtacatcaccgataagtgcgtgctggacatgcggagcatggacttcaagagcaactccgccgtggcctggtccaacaagtccgatttcgcctgcgccaacgccttcaacaacagcattatccccgaggacacattcttcccaagccccgagagcagctgcgacgtgaagctggtggaaaagagcttcgagacagacaccaacctgaacttccagaacctgagcgtgatcggcttcagaatcctgctgctgaaagtggccggctttaacctgctgatgaccctgcggctgtggtccagctaa

SEQ ID NO: 8237 - DNA, 1959 bp, synthetic construct
  source 1..1959: mol_type = other DNA
atggccttaccagtgaccgccttgctcctgccgctggccttgctgctccacgccgccaggccggcatgccgcctggaggaccgctacaagggtaccggcggaggcggatctggcggcggaggtagcggtggcggaggatctgaattcgacatccagatgacacagagccctagcagcctgtctgccagcgtgggagacagagtgaccatcacatgcaaggccagcgaccacatcaacaactggctggcctggtatcagcagaagcctggacaggcccctaagctgctgatctacggcgctaccacactggaaacaggcgtgcccagcagattttctggcagcggctctggcaccgactacaccctgacaatatccagcctccagcctgaggacttcgccacctactactgtcagcagagctggaacaccccttggacattcggccagggcaccaagctggaaatcaagagactcgaggacctgaagaacgtgttcccacctgaggtggccgtgttcgagcctagcgaggccgagatcagccacacccagaaagccaccctcgtgtgcctggctaccggcttctaccccgaccatgtggaactgtcttggtgggtcaacggcaaagaggtgcacagcggcgtgtgtaccgacccccagccactgaaagaacagcccgccctgaacgacagccggtactgcctgagcagcagactgagagtgtccgccaccttctggcagaacccccggaaccacttcagatgccaggtgcagttctacggcctgagcgagaacgacgagtggacccaggacagagccaagcccgtgacccagatcgtgtctgccgaagcctggggcagagccgattgcggctttaccagcgagagctaccagcagggcgtgctgagcgccaccatcctgtacgagatcctgctgggcaaggccaccctgtacgccgtgctggtgtctgccctggtgctgatggctatggtcaagcggaaggacagccggggaagggccaagcgatctggatctggagcaacaaacttctcactactcaaacaagcaggtgacgtggaggagaatcccgggcctactagtgccaccatggactggatttggcgcatccttttccttgtcggcgctgctaccggcgcccattccttcgaacaagttcagcttcaacagcctggcgctgagctggtcaaacctggcgcttctgtgaagatgagctgcaaagccagcggctacgccttcagcagctactggatcaactggatgaagcagaaacccggccagggactcgaatggatcggccaaatctatcccggcgacggcgacaccaactacaacggcaagttcaagggcagagccacactgaccgccgatacctctagcagcacagcctacatgcagctgagcagcctgaccagcgaagatagcgccgtgtacttctgtgcccggtccatcacaacagtcgtgggctgcgctatggactattggggccagggaacaagcgtgaccgtgtctagtacgcgtatccagaaccctgatcctgccgtgtaccagctgcgggatagcaagagcagcgacaagagcgtgtgtctgttcaccgacttcgacagccagaccaacgtgtcccagagcaaggactccgacgtgtacatcaccgataagtgcgtgctggacatgcggagcatggacttcaagagcaactccgccgtggcctggtccaacaagtccgatttcgcctgcgccaacgccttcaacaacagcattatccccgaggacacattcttcccaagccccgagagcagctgcgacgtgaagctggtggaaaagagcttcgagacagacaccaacctgaacttccagaacctgagcgtgatcggcttcagaatcctgctgctgaaagtggccggctttaacctgctgatgaccctgcggctgtggtccagctaa

SEQ ID NO: 8238 - DNA, 1959 bp, synthetic construct
  source 1..1959: mol_type = other DNA
atggccttaccagtgaccgccttgctcctgccgctggccttgctgctccacgccgccaggccggcatgccgcatggaggaccgctacaagggtaccggcggaggcggatctggcggcggaggtagcggtggcggaggatctgaattcgacatccagatgacacagagccctagcagcctgtctgccagcgtgggagacagagtgaccatcacatgcaaggccagcgaccacatcaacaactggctggcctggtatcagcagaagcctggacaggcccctaagctgctgatctacggcgctaccacactggaaacaggcgtgcccagcagattttctggcagcggctctggcaccgactacaccctgacaatatccagcctccagcctgaggacttcgccacctactactgtcagcagagctggaacaccccttggacattcggccagggcaccaagctggaaatcaagagactcgaggacctgaagaacgtgttcccacctgaggtggccgtgttcgagcctagcgaggccgagatcagccacacccagaaagccaccctcgtgtgcctggctaccggcttctaccccgaccatgtggaactgtcttggtgggtcaacggcaaagaggtgcacagcggcgtgtgtaccgacccccagccactgaaagaacagcccgccctgaacgacagccggtactgcctgagcagcagactgagagtgtccgccaccttctggcagaacccccggaaccacttcagatgccaggtgcagttctacggcctgagcgagaacgacgagtggacccaggacagagccaagcccgtgacccagatcgtgtctgccgaagcctggggcagagccgattgcggctttaccagcgagagctaccagcagggcgtgctgagcgccaccatcctgtacgagatcctgctgggcaaggccaccctgtacgccgtgctggtgtctgccctggtgctgatggctatggtcaagcggaaggacagccggggaagggccaagcgatctggatctggagcaacaaacttctcactactcaaacaagcaggtgacgtggaggagaatcccgggcctactagtgccaccatggactggatttggcgcatccttttccttgtcggcgctgctaccggcgcccattccttcgaacaagttcagcttcaacagcctggcgctgagctggtcaaacctggcgcttctgtgaagatgagctgcaaagccagcggctacgccttcagcagctactggatcaactggatgaagcagaaacccggccagggactcgaatggatcggccaaatctatcccggcgacggcgacaccaactacaacggcaagttcaagggcagagccacactgaccgccgatacctctagcagcacagcctacatgcagctgagcagcctgaccagcgaagatagcgccgtgtacttctgtgcccggtccatcacaacagtcgtgggctgcgctatggactattggggccagggaacaagcgtgaccgtgtctagtacgcgtatccagaaccctgatcctgccgtgtaccagctgcgggatagcaagagcagcgacaagagcgtgtgtctgttcaccgacttcgacagccagaccaacgtgtcccagagcaaggactccgacgtgtacatcaccgataagtgcgtgctggacatgcggagcatggacttcaagagcaactccgccgtggcctggtccaacaagtccgatttcgcctgcgccaacgccttcaacaacagcattatccccgaggacacattcttcccaagccccgagagcagctgcgacgtgaagctggtggaaaagagcttcgagacagacaccaacctgaacttccagaacctgagcgtgatcggcttcagaatcctgctgctgaaagtggccggctttaacctgctgatgaccctgcggctgtggtccagctaa

SEQ ID NO: 8239 - DNA, 1959 bp, synthetic construct
  source 1..1959: mol_type = other DNA
atggccttaccagtgaccgccttgctcctgccgctggccttgctgctccacgccgccaggccggcatgccgcgtggaggaccgctacaagggtaccggcggaggcggatctggcggcggaggtagcggtggcggaggatctgaattcgacatccagatgacacagagccctagcagcctgtctgccagcgtgggagacagagtgaccatcacatgcaaggccagcgaccacatcaacaactggctggcctggtatcagcagaagcctggacaggcccctaagctgctgatctacggcgctaccacactggaaacaggcgtgcccagcagattttctggcagcggctctggcaccgactacaccctgacaatatccagcctccagcctgaggacttcgccacctactactgtcagcagagctggaacaccccttggacattcggccagggcaccaagctggaaatcaagagactcgaggacctgaagaacgtgttcccacctgaggtggccgtgttcgagcctagcgaggccgagatcagccacacccagaaagccaccctcgtgtgcctggctaccggcttctaccccgaccatgtggaactgtcttggtgggtcaacggcaaagaggtgcacagcggcgtgtgtaccgacccccagccactgaaagaacagcccgccctgaacgacagccggtactgcctgagcagcagactgagagtgtccgccaccttctggcagaacccccggaaccacttcagatgccaggtgcagttctacggcctgagcgagaacgacgagtggacccaggacagagccaagcccgtgacccagatcgtgtctgccgaagcctggggcagagccgattgcggctttaccagcgagagctaccagcagggcgtgctgagcgccaccatcctgtacgagatcctgctgggcaaggccaccctgtacgccgtgctggtgtctgccctggtgctgatggctatggtcaagcggaaggacagccggggaagggccaagcgatctggatctggagcaacaaacttctcactactcaaacaagcaggtgacgtggaggagaatcccgggcctactagtgccaccatggactggatttggcgcatccttttccttgtcggcgctgctaccggcgcccattccttcgaacaagttcagcttcaacagcctggcgctgagctggtcaaacctggcgcttctgtgaagatgagctgcaaagccagcggctacgccttcagcagctactggatcaactggatgaagcagaaacccggccagggactcgaatggatcggccaaatctatcccggcgacggcgacaccaactacaacggcaagttcaagggcagagccacactgaccgccgatacctctagcagcacagcctacatgcagctgagcagcctgaccagcgaagatagcgccgtgtacttctgtgcccggtccatcacaacagtcgtgggctgcgctatggactattggggccagggaacaagcgtgaccgtgtctagtacgcgtatccagaaccctgatcctgccgtgtaccagctgcgggatagcaagagcagcgacaagagcgtgtgtctgttcaccgacttcgacagccagaccaacgtgtcccagagcaaggactccgacgtgtacatcaccgataagtgcgtgctggacatgcggagcatggacttcaagagcaactccgccgtggcctggtccaacaagtccgatttcgcctgcgccaacgccttcaacaacagcattatccccgaggacacattcttcccaagccccgagagcagctgcgacgtgaagctggtggaaaagagcttcgagacagacaccaacctgaacttccagaacctgagcgtgatcggcttcagaatcctgctgctgaaagtggccggctttaacctgctgatgaccctgcggctgtggtccagctaa

SEQ ID NO: 8240 - DNA, 1959 bp, synthetic construct
  source 1..1959: mol_type = other DNA
atggccttaccagtgaccgccttgctcctgccgctggccttgctgctccacgccgccaggccggcatgccgcgccgaggaccgctacaagggtaccggcggaggcggatctggcggcggaggtagcggtggcggaggatctgaattcgacatccagatgacacagagccctagcagcctgtctgccagcgtgggagacagagtgaccatcacatgcaaggccagcgaccacatcaacaactggctggcctggtatcagcagaagcctggacaggcccctaagctgctgatctacggcgctaccacactggaaacaggcgtgcccagcagattttctggcagcggctctggcaccgactacaccctgacaatatccagcctccagcctgaggacttcgccacctactactgtcagcagagctggaacaccccttggacattcggccagggcaccaagctggaaatcaagagactcgaggacctgaagaacgtgttcccacctgaggtggccgtgttcgagcctagcgaggccgagatcagccacacccagaaagccaccctcgtgtgcctggctaccggcttctaccccgaccatgtggaactgtcttggtgggtcaacggcaaagaggtgcacagcggcgtgtgtaccgacccccagccactgaaagaacagcccgccctgaacgacagccggtactgcctgagcagcagactgagagtgtccgccaccttctggcagaacccccggaaccacttcagatgccaggtgcagttctacggcctgagcgagaacgacgagtggacccaggacagagccaagcccgtgacccagatcgtgtctgccgaagcctggggcagagccgattgcggctttaccagcgagagctaccagcagggcgtgctgagcgccaccatcctgtacgagatcctgctgggcaaggccaccctgtacgccgtgctggtgtctgccctggtgctgatggctatggtcaagcggaaggacagccggggaagggccaagcgatctggatctggagcaacaaacttctcactactcaaacaagcaggtgacgtggaggagaatcccgggcctactagtgccaccatggactggatttggcgcatccttttccttgtcggcgctgctaccggcgcccattccttcgaacaagttcagcttcaacagcctggcgctgagctggtcaaacctggcgcttctgtgaagatgagctgcaaagccagcggctacgccttcagcagctactggatcaactggatgaagcagaaacccggccagggactcgaatggatcggccaaatctatcccggcgacggcgacaccaactacaacggcaagttcaagggcagagccacactgaccgccgatacctctagcagcacagcctacatgcagctgagcagcctgaccagcgaagatagcgccgtgtacttctgtgcccggtccatcacaacagtcgtgggctgcgctatggactattggggccagggaacaagcgtgaccgtgtctagtacgcgtatccagaaccctgatcctgccgtgtaccagctgcgggatagcaagagcagcgacaagagcgtgtgtctgttcaccgacttcgacagccagaccaacgtgtcccagagcaaggactccgacgtgtacatcaccgataagtgcgtgctggacatgcggagcatggacttcaagagcaactccgccgtggcctggtccaacaagtccgatttcgcctgcgccaacgccttcaacaacagcattatccccgaggacacattcttcccaagccccgagagcagctgcgacgtgaagctggtggaaaagagcttcgagacagacaccaacctgaacttccagaacctgagcgtgatcggcttcagaatcctgctgctgaaagtggccggctttaacctgctgatgaccctgcggctgtggtccagctaa

SEQ ID NO: 8241 - DNA, 1959 bp, synthetic construct
  source 1..1959: mol_type = other DNA
atggccttaccagtgaccgccttgctcctgccgctggccttgctgctccacgccgccaggccggcatgccgcttcgaggaccgctacaagggtaccggcggaggcggatctggcggcggaggtagcggtggcggaggatctgaattcgacatccagatgacacagagccctagcagcctgtctgccagcgtgggagacagagtgaccatcacatgcaaggccagcgaccacatcaacaactggctggcctggtatcagcagaagcctggacaggcccctaagctgctgatctacggcgctaccacactggaaacaggcgtgcccagcagattttctggcagcggctctggcaccgactacaccctgacaatatccagcctccagcctgaggacttcgccacctactactgtcagcagagctggaacaccccttggacattcggccagggcaccaagctggaaatcaagagactcgaggacctgaagaacgtgttcccacctgaggtggccgtgttcgagcctagcgaggccgagatcagccacacccagaaagccaccctcgtgtgcctggctaccggcttctaccccgaccatgtggaactgtcttggtgggtcaacggcaaagaggtgcacagcggcgtgtgtaccgacccccagccactgaaagaacagcccgccctgaacgacagccggtactgcctgagcagcagactgagagtgtccgccaccttctggcagaacccccggaaccacttcagatgccaggtgcagttctacggcctgagcgagaacgacgagtggacccaggacagagccaagcccgtgacccagatcgtgtctgccgaagcctggggcagagccgattgcggctttaccagcgagagctaccagcagggcgtgctgagcgccaccatcctgtacgagatcctgctgggcaaggccaccctgtacgccgtgctggtgtctgccctggtgctgatggctatggtcaagcggaaggacagccggggaagggccaagcgatctggatctggagcaacaaacttctcactactcaaacaagcaggtgacgtggaggagaatcccgggcctactagtgccaccatggactggatttggcgcatccttttccttgtcggcgctgctaccggcgcccattccttcgaacaagttcagcttcaacagcctggcgctgagctggtcaaacctggcgcttctgtgaagatgagctgcaaagccagcggctacgccttcagcagctactggatcaactggatgaagcagaaacccggccagggactcgaatggatcggccaaatctatcccggcgacggcgacaccaactacaacggcaagttcaagggcagagccacactgaccgccgatacctctagcagcacagcctacatgcagctgagcagcctgaccagcgaagatagcgccgtgtacttctgtgcccggtccatcacaacagtcgtgggctgcgctatggactattggggccagggaacaagcgtgaccgtgtctagtacgcgtatccagaaccctgatcctgccgtgtaccagctgcgggatagcaagagcagcgacaagagcgtgtgtctgttcaccgacttcgacagccagaccaacgtgtcccagagcaaggactccgacgtgtacatcaccgataagtgcgtgctggacatgcggagcatggacttcaagagcaactccgccgtggcctggtccaacaagtccgatttcgcctgcgccaacgccttcaacaacagcattatccccgaggacacattcttcccaagccccgagagcagctgcgacgtgaagctggtggaaaagagcttcgagacagacaccaacctgaacttccagaacctgagcgtgatcggcttcagaatcctgctgctgaaagtggccggctttaacctgctgatgaccctgcggctgtggtccagctaa

SEQ ID NO: 8242 - DNA, 1959 bp, synthetic construct
  source 1..1959: mol_type = other DNA
atggccttaccagtgaccgccttgctcctgccgctggccttgctgctccacgccgccaggccggcatgccgccacgaggaccgctacaagggtaccggcggaggcggatctggcggcggaggtagcggtggcggaggatctgaattcgacatccagatgacacagagccctagcagcctgtctgccagcgtgggagacagagtgaccatcacatgcaaggccagcgaccacatcaacaactggctggcctggtatcagcagaagcctggacaggcccctaagctgctgatctacggcgctaccacactggaaacaggcgtgcccagcagattttctggcagcggctctggcaccgactacaccctgacaatatccagcctccagcctgaggacttcgccacctactactgtcagcagagctggaacaccccttggacattcggccagggcaccaagctggaaatcaagagactcgaggacctgaagaacgtgttcccacctgaggtggccgtgttcgagcctagcgaggccgagatcagccacacccagaaagccaccctcgtgtgcctggctaccggcttctaccccgaccatgtggaactgtcttggtgggtcaacggcaaagaggtgcacagcggcgtgtgtaccgacccccagccactgaaagaacagcccgccctgaacgacagccggtactgcctgagcagcagactgagagtgtccgccaccttctggcagaacccccggaaccacttcagatgccaggtgcagttctacggcctgagcgagaacgacgagtggacccaggacagagccaagcccgtgacccagatcgtgtctgccgaagcctggggcagagccgattgcggctttaccagcgagagctaccagcagggcgtgctgagcgccaccatcctgtacgagatcctgctgggcaaggccaccctgtacgccgtgctggtgtctgccctggtgctgatggctatggtcaagcggaaggacagccggggaagggccaagcgatctggatctggagcaacaaacttctcactactcaaacaagcaggtgacgtggaggagaatcccgggcctactagtgccaccatggactggatttggcgcatccttttccttgtcggcgctgctaccggcgcccattccttcgaacaagttcagcttcaacagcctggcgctgagctggtcaaacctggcgcttctgtgaagatgagctgcaaagccagcggctacgccttcagcagctactggatcaactggatgaagcagaaacccggccagggactcgaatggatcggccaaatctatcccggcgacggcgacaccaactacaacggcaagttcaagggcagagccacactgaccgccgatacctctagcagcacagcctacatgcagctgagcagcctgaccagcgaagatagcgccgtgtacttctgtgcccggtccatcacaacagtcgtgggctgcgctatggactattggggccagggaacaagcgtgaccgtgtctagtacgcgtatccagaaccctgatcctgccgtgtaccagctgcgggatagcaagagcagcgacaagagcgtgtgtctgttcaccgacttcgacagccagaccaacgtgtcccagagcaaggactccgacgtgtacatcaccgataagtgcgtgctggacatgcggagcatggacttcaagagcaactccgccgtggcctggtccaacaagtccgatttcgcctgcgccaacgccttcaacaacagcattatccccgaggacacattcttcccaagccccgagagcagctgcgacgtgaagctggtggaaaagagcttcgagacagacaccaacctgaacttccagaacctgagcgtgatcggcttcagaatcctgctgctgaaagtggccggctttaacctgctgatgaccctgcggctgtggtccagctaa

SEQ ID NO: 8243 - DNA, 1959 bp, synthetic construct
  source 1..1959: mol_type = other DNA
atggccttaccagtgaccgccttgctcctgccgctggccttgctgctccacgccgccaggccggcatgccgcggcgaggaccgctacaagggtaccggcggaggcggatctggcggcggaggtagcggtggcggaggatctgaattcgacatccagatgacacagagccctagcagcctgtctgccagcgtgggagacagagtgaccatcacatgcaaggccagcgaccacatcaacaactggctggcctggtatcagcagaagcctggacaggcccctaagctgctgatctacggcgctaccacactggaaacaggcgtgcccagcagattttctggcagcggctctggcaccgactacaccctgacaatatccagcctccagcctgaggacttcgccacctactactgtcagcagagctggaacaccccttggacattcggccagggcaccaagctggaaatcaagagactcgaggacctgaagaacgtgttcccacctgaggtggccgtgttcgagcctagcgaggccgagatcagccacacccagaaagccaccctcgtgtgcctggctaccggcttctaccccgaccatgtggaactgtcttggtgggtcaacggcaaagaggtgcacagcggcgtgtgtaccgacccccagccactgaaagaacagcccgccctgaacgacagccggtactgcctgagcagcagactgagagtgtccgccaccttctggcagaacccccggaaccacttcagatgccaggtgcagttctacggcctgagcgagaacgacgagtggacccaggacagagccaagcccgtgacccagatcgtgtctgccgaagcctggggcagagccgattgcggctttaccagcgagagctaccagcagggcgtgctgagcgccaccatcctgtacgagatcctgctgggcaaggccaccctgtacgccgtgctggtgtctgccctggtgctgatggctatggtcaagcggaaggacagccggggaagggccaagcgatctggatctggagcaacaaacttctcactactcaaacaagcaggtgacgtggaggagaatcccgggcctactagtgccaccatggactggatttggcgcatccttttccttgtcggcgctgctaccggcgcccattccttcgaacaagttcagcttcaacagcctggcgctgagctggtcaaacctggcgcttctgtgaagatgagctgcaaagccagcggctacgccttcagcagctactggatcaactggatgaagcagaaacccggccagggactcgaatggatcggccaaatctatcccggcgacggcgacaccaactacaacggcaagttcaagggcagagccacactgaccgccgatacctctagcagcacagcctacatgcagctgagcagcctgaccagcgaagatagcgccgtgtacttctgtgcccggtccatcacaacagtcgtgggctgcgctatggactattggggccagggaacaagcgtgaccgtgtctagtacgcgtatccagaaccctgatcctgccgtgtaccagctgcgggatagcaagagcagcgacaagagcgtgtgtctgttcaccgacttcgacagccagaccaacgtgtcccagagcaaggactccgacgtgtacatcaccgataagtgcgtgctggacatgcggagcatggacttcaagagcaactccgccgtggcctggtccaacaagtccgatttcgcctgcgccaacgccttcaacaacagcattatccccgaggacacattcttcccaagccccgagagcagctgcgacgtgaagctggtggaaaagagcttcgagacagacaccaacctgaacttccagaacctgagcgtgatcggcttcagaatcctgctgctgaaagtggccggctttaacctgctgatgaccctgcggctgtggtccagctaa

SEQ ID NO: 8244 - DNA, 1959 bp, synthetic construct
  source 1..1959: mol_type = other DNA
atggccttaccagtgaccgccttgctcctgccgctggccttgctgctccacgccgccaggccggcatgccgcaccgaggaccgctacaagggtaccggcggaggcggatctggcggcggaggtagcggtggcggaggatctgaattcgacatccagatgacacagagccctagcagcctgtctgccagcgtgggagacagagtgaccatcacatgcaaggccagcgaccacatcaacaactggctggcctggtatcagcagaagcctggacaggcccctaagctgctgatctacggcgctaccacactggaaacaggcgtgcccagcagattttctggcagcggctctggcaccgactacaccctgacaatatccagcctccagcctgaggacttcgccacctactactgtcagcagagctggaacaccccttggacattcggccagggcaccaagctggaaatcaagagactcgaggacctgaagaacgtgttcccacctgaggtggccgtgttcgagcctagcgaggccgagatcagccacacccagaaagccaccctcgtgtgcctggctaccggcttctaccccgaccatgtggaactgtcttggtgggtcaacggcaaagaggtgcacagcggcgtgtgtaccgacccccagccactgaaagaacagcccgccctgaacgacagccggtactgcctgagcagcagactgagagtgtccgccaccttctggcagaacccccggaaccacttcagatgccaggtgcagttctacggcctgagcgagaacgacgagtggacccaggacagagccaagcccgtgacccagatcgtgtctgccgaagcctggggcagagccgattgcggctttaccagcgagagctaccagcagggcgtgctgagcgccaccatcctgtacgagatcctgctgggcaaggccaccctgtacgccgtgctggtgtctgccctggtgctgatggctatggtcaagcggaaggacagccggggaagggccaagcgatctggatctggagcaacaaacttctcactactcaaacaagcaggtgacgtggaggagaatcccgggcctactagtgccaccatggactggatttggcgcatccttttccttgtcggcgctgctaccggcgcccattccttcgaacaagttcagcttcaacagcctggcgctgagctggtcaaacctggcgcttctgtgaagatgagctgcaaagccagcggctacgccttcagcagctactggatcaactggatgaagcagaaacccggccagggactcgaatggatcggccaaatctatcccggcgacggcgacaccaactacaacggcaagttcaagggcagagccacactgaccgccgatacctctagcagcacagcctacatgcagctgagcagcctgaccagcgaagatagcgccgtgtacttctgtgcccggtccatcacaacagtcgtgggctgcgctatggactattggggccagggaacaagcgtgaccgtgtctagtacgcgtatccagaaccctgatcctgccgtgtaccagctgcgggatagcaagagcagcgacaagagcgtgtgtctgttcaccgacttcgacagccagaccaacgtgtcccagagcaaggactccgacgtgtacatcaccgataagtgcgtgctggacatgcggagcatggacttcaagagcaactccgccgtggcctggtccaacaagtccgatttcgcctgcgccaacgccttcaacaacagcattatccccgaggacacattcttcccaagccccgagagcagctgcgacgtgaagctggtggaaaagagcttcgagacagacaccaacctgaacttccagaacctgagcgtgatcggcttcagaatcctgctgctgaaagtggccggctttaacctgctgatgaccctgcggctgtggtccagctaa

SEQ ID NO: 8245 - DNA, 1959 bp, synthetic construct
  source 1..1959: mol_type = other DNA
atggccttaccagtgaccgccttgctcctgccgctggccttgctgctccacgccgccaggccggcatgcagcagcgaggaccgctacaagggtaccggcggaggcggatctggcggcggaggtagcggtggcggaggatctgaattcgacatccagatgacacagagccctagcagcctgtctgccagcgtgggagacagagtgaccatcacatgcaaggccagcgaccacatcaacaactggctggcctggtatcagcagaagcctggacaggcccctaagctgctgatctacggcgctaccacactggaaacaggcgtgcccagcagattttctggcagcggctctggcaccgactacaccctgacaatatccagcctccagcctgaggacttcgccacctactactgtcagcagagctggaacaccccttggacattcggccagggcaccaagctggaaatcaagagactcgaggacctgaagaacgtgttcccacctgaggtggccgtgttcgagcctagcgaggccgagatcagccacacccagaaagccaccctcgtgtgcctggctaccggcttctaccccgaccatgtggaactgtcttggtgggtcaacggcaaagaggtgcacagcggcgtgtgtaccgacccccagccactgaaagaacagcccgccctgaacgacagccggtactgcctgagcagcagactgagagtgtccgccaccttctggcagaacccccggaaccacttcagatgccaggtgcagttctacggcctgagcgagaacgacgagtggacccaggacagagccaagcccgtgacccagatcgtgtctgccgaagcctggggcagagccgattgcggctttaccagcgagagctaccagcagggcgtgctgagcgccaccatcctgtacgagatcctgctgggcaaggccaccctgtacgccgtgctggtgtctgccctggtgctgatggctatggtcaagcggaaggacagccggggaagggccaagcgatctggatctggagcaacaaacttctcactactcaaacaagcaggtgacgtggaggagaatcccgggcctactagtgccaccatggactggatttggcgcatccttttccttgtcggcgctgctaccggcgcccattccttcgaacaagttcagcttcaacagcctggcgctgagctggtcaaacctggcgcttctgtgaagatgagctgcaaagccagcggctacgccttcagcagctactggatcaactggatgaagcagaaacccggccagggactcgaatggatcggccaaatctatcccggcgacggcgacaccaactacaacggcaagttcaagggcagagccacactgaccgccgatacctctagcagcacagcctacatgcagctgagcagcctgaccagcgaagatagcgccgtgtacttctgtgcccggtccatcacaacagtcgtgggctgcgctatggactattggggccagggaacaagcgtgaccgtgtctagtacgcgtatccagaaccctgatcctgccgtgtaccagctgcgggatagcaagagcagcgacaagagcgtgtgtctgttcaccgacttcgacagccagaccaacgtgtcccagagcaaggactccgacgtgtacatcaccgataagtgcgtgctggacatgcggagcatggacttcaagagcaactccgccgtggcctggtccaacaagtccgatttcgcctgcgccaacgccttcaacaacagcattatccccgaggacacattcttcccaagccccgagagcagctgcgacgtgaagctggtggaaaagagcttcgagacagacaccaacctgaacttccagaacctgagcgtgatcggcttcagaatcctgctgctgaaagtggccggctttaacctgctgatgaccctgcggctgtggtccagctaa

SEQ ID NO: 8246 - DNA, 1959 bp, synthetic construct
  source 1..1959: mol_type = other DNA
atggccttaccagtgaccgccttgctcctgccgctggccttgctgctccacgccgccaggccggcatgccacagcgaggaccgctacaagggtaccggcggaggcggatctggcggcggaggtagcggtggcggaggatctgaattcgacatccagatgacacagagccctagcagcctgtctgccagcgtgggagacagagtgaccatcacatgcaaggccagcgaccacatcaacaactggctggcctggtatcagcagaagcctggacaggcccctaagctgctgatctacggcgctaccacactggaaacaggcgtgcccagcagattttctggcagcggctctggcaccgactacaccctgacaatatccagcctccagcctgaggacttcgccacctactactgtcagcagagctggaacaccccttggacattcggccagggcaccaagctggaaatcaagagactcgaggacctgaagaacgtgttcccacctgaggtggccgtgttcgagcctagcgaggccgagatcagccacacccagaaagccaccctcgtgtgcctggctaccggcttctaccccgaccatgtggaactgtcttggtgggtcaacggcaaagaggtgcacagcggcgtgtgtaccgacccccagccactgaaagaacagcccgccctgaacgacagccggtactgcctgagcagcagactgagagtgtccgccaccttctggcagaacccccggaaccacttcagatgccaggtgcagttctacggcctgagcgagaacgacgagtggacccaggacagagccaagcccgtgacccagatcgtgtctgccgaagcctggggcagagccgattgcggctttaccagcgagagctaccagcagggcgtgctgagcgccaccatcctgtacgagatcctgctgggcaaggccaccctgtacgccgtgctggtgtctgccctggtgctgatggctatggtcaagcggaaggacagccggggaagggccaagcgatctggatctggagcaacaaacttctcactactcaaacaagcaggtgacgtggaggagaatcccgggcctactagtgccaccatggactggatttggcgcatccttttccttgtcggcgctgctaccggcgcccattccttcgaacaagttcagcttcaacagcctggcgctgagctggtcaaacctggcgcttctgtgaagatgagctgcaaagccagcggctacgccttcagcagctactggatcaactggatgaagcagaaacccggccagggactcgaatggatcggccaaatctatcccggcgacggcgacaccaactacaacggcaagttcaagggcagagccacactgaccgccgatacctctagcagcacagcctacatgcagctgagcagcctgaccagcgaagatagcgccgtgtacttctgtgcccggtccatcacaacagtcgtgggctgcgctatggactattggggccagggaacaagcgtgaccgtgtctagtacgcgtatccagaaccctgatcctgccgtgtaccagctgcgggatagcaagagcagcgacaagagcgtgtgtctgttcaccgacttcgacagccagaccaacgtgtcccagagcaaggactccgacgtgtacatcaccgataagtgcgtgctggacatgcggagcatggacttcaagagcaactccgccgtggcctggtccaacaagtccgatttcgcctgcgccaacgccttcaacaacagcattatccccgaggacacattcttcccaagccccgagagcagctgcgacgtgaagctggtggaaaagagcttcgagacagacaccaacctgaacttccagaacctgagcgtgatcggcttcagaatcctgctgctgaaagtggccggctttaacctgctgatgaccctgcggctgtggtccagctaa

SEQ ID NO: 8247 - DNA, 1959 bp, synthetic construct
  source 1..1959: mol_type = other DNA
atggccttaccagtgaccgccttgctcctgccgctggccttgctgctccacgccgccaggccggcatgcgacagcgaggaccgctacaagggtaccggcggaggcggatctggcggcggaggtagcggtggcggaggatctgaattcgacatccagatgacacagagccctagcagcctgtctgccagcgtgggagacagagtgaccatcacatgcaaggccagcgaccacatcaacaactggctggcctggtatcagcagaagcctggacaggcccctaagctgctgatctacggcgctaccacactggaaacaggcgtgcccagcagattttctggcagcggctctggcaccgactacaccctgacaatatccagcctccagcctgaggacttcgccacctactactgtcagcagagctggaacaccccttggacattcggccagggcaccaagctggaaatcaagagactcgaggacctgaagaacgtgttcccacctgaggtggccgtgttcgagcctagcgaggccgagatcagccacacccagaaagccaccctcgtgtgcctggctaccggcttctaccccgaccatgtggaactgtcttggtgggtcaacggcaaagaggtgcacagcggcgtgtgtaccgacccccagccactgaaagaacagcccgccctgaacgacagccggtactgcctgagcagcagactgagagtgtccgccaccttctggcagaacccccggaaccacttcagatgccaggtgcagttctacggcctgagcgagaacgacgagtggacccaggacagagccaagcccgtgacccagatcgtgtctgccgaagcctggggcagagccgattgcggctttaccagcgagagctaccagcagggcgtgctgagcgccaccatcctgtacgagatcctgctgggcaaggccaccctgtacgccgtgctggtgtctgccctggtgctgatggctatggtcaagcggaaggacagccggggaagggccaagcgatctggatctggagcaacaaacttctcactactcaaacaagcaggtgacgtggaggagaatcccgggcctactagtgccaccatggactggatttggcgcatccttttccttgtcggcgctgctaccggcgcccattccttcgaacaagttcagcttcaacagcctggcgctgagctggtcaaacctggcgcttctgtgaagatgagctgcaaagccagcggctacgccttcagcagctactggatcaactggatgaagcagaaacccggccagggactcgaatggatcggccaaatctatcccggcgacggcgacaccaactacaacggcaagttcaagggcagagccacactgaccgccgatacctctagcagcacagcctacatgcagctgagcagcctgaccagcgaagatagcgccgtgtacttctgtgcccggtccatcacaacagtcgtgggctgcgctatggactattggggccagggaacaagcgtgaccgtgtctagtacgcgtatccagaaccctgatcctgccgtgtaccagctgcgggatagcaagagcagcgacaagagcgtgtgtctgttcaccgacttcgacagccagaccaacgtgtcccagagcaaggactccgacgtgtacatcaccgataagtgcgtgctggacatgcggagcatggacttcaagagcaactccgccgtggcctggtccaacaagtccgatttcgcctgcgccaacgccttcaacaacagcattatccccgaggacacattcttcccaagccccgagagcagctgcgacgtgaagctggtggaaaagagcttcgagacagacaccaacctgaacttccagaacctgagcgtgatcggcttcagaatcctgctgctgaaagtggccggctttaacctgctgatgaccctgcggctgtggtccagctaa

SEQ ID NO: 8248 - DNA, 1959 bp, synthetic construct
  source 1..1959: mol_type = other DNA
atggccttaccagtgaccgccttgctcctgccgctggccttgctgctccacgccgccaggccggcatgcttcagcgaggaccgctacaagggtaccggcggaggcggatctggcggcggaggtagcggtggcggaggatctgaattcgacatccagatgacacagagccctagcagcctgtctgccagcgtgggagacagagtgaccatcacatgcaaggccagcgaccacatcaacaactggctggcctggtatcagcagaagcctggacaggcccctaagctgctgatctacggcgctaccacactggaaacaggcgtgcccagcagattttctggcagcggctctggcaccgactacaccctgacaatatccagcctccagcctgaggacttcgccacctactactgtcagcagagctggaacaccccttggacattcggccagggcaccaagctggaaatcaagagactcgaggacctgaagaacgtgttcccacctgaggtggccgtgttcgagcctagcgaggccgagatcagccacacccagaaagccaccctcgtgtgcctggctaccggcttctaccccgaccatgtggaactgtcttggtgggtcaacggcaaagaggtgcacagcggcgtgtgtaccgacccccagccactgaaagaacagcccgccctgaacgacagccggtactgcctgagcagcagactgagagtgtccgccaccttctggcagaacccccggaaccacttcagatgccaggtgcagttctacggcctgagcgagaacgacgagtggacccaggacagagccaagcccgtgacccagatcgtgtctgccgaagcctggggcagagccgattgcggctttaccagcgagagctaccagcagggcgtgctgagcgccaccatcctgtacgagatcctgctgggcaaggccaccctgtacgccgtgctggtgtctgccctggtgctgatggctatggtcaagcggaaggacagccggggaagggccaagcgatctggatctggagcaacaaacttctcactactcaaacaagcaggtgacgtggaggagaatcccgggcctactagtgccaccatggactggatttggcgcatccttttccttgtcggcgctgctaccggcgcccattccttcgaacaagttcagcttcaacagcctggcgctgagctggtcaaacctggcgcttctgtgaagatgagctgcaaagccagcggctacgccttcagcagctactggatcaactggatgaagcagaaacccggccagggactcgaatggatcggccaaatctatcccggcgacggcgacaccaactacaacggcaagttcaagggcagagccacactgaccgccgatacctctagcagcacagcctacatgcagctgagcagcctgaccagcgaagatagcgccgtgtacttctgtgcccggtccatcacaacagtcgtgggctgcgctatggactattggggccagggaacaagcgtgaccgtgtctagtacgcgtatccagaaccctgatcctgccgtgtaccagctgcgggatagcaagagcagcgacaagagcgtgtgtctgttcaccgacttcgacagccagaccaacgtgtcccagagcaaggactccgacgtgtacatcaccgataagtgcgtgctggacatgcggagcatggacttcaagagcaactccgccgtggcctggtccaacaagtccgatttcgcctgcgccaacgccttcaacaacagcattatccccgaggacacattcttcccaagccccgagagcagctgcgacgtgaagctggtggaaaagagcttcgagacagacaccaacctgaacttccagaacctgagcgtgatcggcttcagaatcctgctgctgaaagtggccggctttaacctgctgatgaccctgcggctgtggtccagctaa

SEQ ID NO: 8249 - DNA, 1959 bp, synthetic construct; identical to SEQ ID NO: 8227
  source 1..1959: mol_type = other DNA

SEQ ID NO: 8250 - DNA, 1959 bp, synthetic construct; identical to SEQ ID NO: 8228
  source 1..1959: mol_type = other DNA

SEQ ID NO: 8251 - DNA, 1962 bp, synthetic construct; identical to SEQ ID NO: 8103
  source 1..1962: mol_type = other DNA

SEQ ID NO: 8252 - DNA, 1962 bp, synthetic construct
  source 1..1962: mol_type = other DNA
atggccttaccagtgaccgccttgctcctgccgctggccttgctgctccacgccgccaggccggcatgcgcccgcagcgaggaccgcttcaagggtaccggcggaggcggatctggcggcggaggtagcggtggcggaggatctgaattcgacatccagatgacacagagccctagcagcctgtctgccagcgtgggagacagagtgaccatcacatgcaaggccagcgaccacatcaacaactggctggcctggtatcagcagaagcctggacaggcccctaagctgctgatctacggcgctaccacactggaaacaggcgtgcccagcagattttctggcagcggctctggcaccgactacaccctgacaatatccagcctccagcctgaggacttcgccacctactactgtcagcagagctggaacaccccttggacattcggccagggcaccaagctggaaatcaagagactcgaggacctgaagaacgtgttcccacctgaggtggccgtgttcgagcctagcgaggccgagatcagccacacccagaaagccaccctcgtgtgcctggctaccggcttctaccccgaccatgtggaactgtcttggtgggtcaacggcaaagaggtgcacagcggcgtgtgtaccgacccccagccactgaaagaacagcccgccctgaacgacagccggtactgcctgagcagcagactgagagtgtccgccaccttctggcagaacccccggaaccacttcagatgccaggtgcagttctacggcctgagcgagaacgacgagtggacccaggacagagccaagcccgtgacccagatcgtgtctgccgaagcctggggcagagccgattgcggctttaccagcgagagctaccagcagggcgtgctgagcgccaccatcctgtacgagatcctgctgggcaaggccaccctgtacgccgtgctggtgtctgccctggtgctgatggctatggtcaagcggaaggacagccggggaagggccaagcgatctggatctggagcaacaaacttctcactactcaaacaagcaggtgacgtggaggagaatcccgggcctactagtgccaccatggactggatttggcgcatccttttccttgtcggcgctgctaccggcgcccattccttcgaacaagttcagcttcaacagcctggcgctgagctggtcaaacctggcgcttctgtgaagatgagctgcaaagccagcggctacgccttcagcagctactggatcaactggatgaagcagaaacccggccagggactcgaatggatcggccaaatctatcccggcgacggcgacaccaactacaacggcaagttcaagggcagagccacactgaccgccgatacctctagcagcacagcctacatgcagctgagcagcctgaccagcgaagatagcgccgtgtacttctgtgcccggtccatcacaacagtcgtgggctgcgctatggactattggggccagggaacaagcgtgaccgtgtctagtacgcgtatccagaaccctgatcctgccgtgtaccagctgcgggatagcaagagcagcgacaagagcgtgtgtctgttcaccgacttcgacagccagaccaacgtgtcccagagcaaggactccgacgtgtacatcaccgataagtgcgtgctggacatgcggagcatggacttcaagagcaactccgccgtggcctggtccaacaagtccgatttcgcctgcgccaacgccttcaacaacagcattatccccgaggacacattcttcccaagccccgagagcagctgcgacgtgaagctggtggaaaagagcttcgagacagacaccaacctgaacttccagaacctgagcgtgatcggcttcagaatcctgctgctgaaagtggccggctttaacctgctgatgaccctgcggctgtggtccagctaa

SEQ ID NO: 8253 - DNA, 1962 bp, synthetic construct
  source 1..1962: mol_type = other DNA
atggccttaccagtgaccgccttgctcctgccgctggccttgctgctccacgccgccaggccggcatgcgcccgcagcgaggaccgccacaagggtaccggcggaggcggatctggcggcggaggtagcggtggcggaggatctgaattcgacatccagatgacacagagccctagcagcctgtctgccagcgtgggagacagagtgaccatcacatgcaaggccagcgaccacatcaacaactggctggcctggtatcagcagaagcctggacaggcccctaagctgctgatctacggcgctaccacactggaaacaggcgtgcccagcagattttctggcagcggctctggcaccgactacaccctgacaatatccagcctccagcctgaggacttcgccacctactactgtcagcagagctggaacaccccttggacattcggccagggcaccaagctggaaatcaagagactcgaggacctgaagaacgtgttcccacctgaggtggccgtgttcgagcctagcgaggccgagatcagccacacccagaaagccaccctcgtgtgcctggctaccggcttctaccccgaccatgtggaactgtcttggtgggtcaacggcaaagaggtgcacagcggcgtgtgtaccgacccccagccactgaaagaacagcccgccctgaacgacagccggtactgcctgagcagcagactgagagtgtccgccaccttctggcagaacccccggaaccacttcagatgccaggtgcagttctacggcctgagcgagaacgacgagtggacccaggacagagccaagcccgtgacccagatcgtgtctgccgaagcctggggcagagccgattgcggctttaccagcgagagctaccagcagggcgtgctgagcgccaccatcctgtacgagatcctgctgggcaaggccaccctgtacgccgtgctggtgtctgccctggtgctgatggctatggtcaagcggaaggacagccggggaagggccaagcgatctggatctggagcaacaaacttctcactactcaaacaagcaggtgacgtggaggagaatcccgggcctactagtgccaccatggactggatttggcgcatccttttccttgtcggcgctgctaccggcgcccattccttcgaacaagttcagcttcaacagcctggcgctgagctggtcaaacctggcgcttctgtgaagatgagctgcaaagccagcggctacgccttcagcagctactggatcaactggatgaagcagaaacccggccagggactcgaatggatcggccaaatctatcccggcgacggcgacaccaactacaacggcaagttcaagggcagagccacactgaccgccgatacctctagcagcacagcctacatgcagctgagcagcctgaccagcgaagatagcgccgtgtacttctgtgcccggtccatcacaacagtcgtgggctgcgctatggactattggggccagggaacaagcgtgaccgtgtctagtacgcgtatccagaaccctgatcctgccgtgtaccagctgcgggatagcaagagcagcgacaagagcgtgtgtctgttcaccgacttcgacagccagaccaacgtgtcccagagcaaggactccgacgtgtacatcaccgataagtgcgtgctggacatgcggagcatggacttcaagagcaactccgccgtggcctggtccaacaagtccgatttcgcctgcgccaacgccttcaacaacagcattatccccgaggacacattcttcccaagccccgagagcagctgcgacgtgaagctggtggaaaagagcttcgagacagacaccaacctgaacttccagaacctgagcgtgatcggcttcagaatcctgctgctgaaagtggccggctttaacctgctgatgaccctgcggctgtggtccagctaa

SEQ ID NO: 8254 - DNA, 1962 bp, synthetic construct; identical to SEQ ID NO: 8123
  source 1..1962: mol_type = other DNA

SEQ ID NO: 8255 - DNA, 1962 bp, synthetic construct; identical to SEQ ID NO: 8126
  source 1..1962: mol_type = other DNA

SEQ ID NO: 8256 - DNA, 1962 bp, synthetic construct; identical to SEQ ID NO: 8127
  source 1..1962: mol_type = other DNA

SEQ ID NO: 8257 - DNA, 1962 bp, synthetic construct
  source 1..1962: mol_type = other DNA
atggccttaccagtgaccgccttgctcctgccgctggccttgctgctccacgccgccaggccggcatgcgcccgcagcgagtggcgctacaagggtaccggcggaggcggatctggcggcggaggtagcggtggcggaggatctgaattcgacatccagatgacacagagccctagcagcctgtctgccagcgtgggagacagagtgaccatcacatgcaaggccagcgaccacatcaacaactggctggcctggtatcagcagaagcctggacaggcccctaagctgctgatctacggcgctaccacactggaaacaggcgtgcccagcagattttctggcagcggctctggcaccgactacaccctgacaatatccagcctccagcctgaggacttcgccacctactactgtcagcagagctggaacaccccttggacattcggccagggcaccaagctggaaatcaagagactcgaggacctgaagaacgtgttcccacctgaggtggccgtgttcgagcctagcgaggccgagatcagccacacccagaaagccaccctcgtgtgcctggctaccggcttctaccccgaccatgtggaactgtcttggtgggtcaacggcaaagaggtgcacagcggcgtgtgtaccgacccccagccactgaaagaacagcccgccctgaacgacagccggtactgcctgagcagcagactgagagtgtccgccaccttctggcagaacccccggaaccacttcagatgccaggtgcagttctacggcctgagcgagaacgacgagtggacccaggacagagccaagcccgtgacccagatcgtgtctgccgaagcctggggcagagccgattgcggctttaccagcgagagctaccagcagggcgtgctgagcgccaccatcctgtacgagatcctgctgggcaaggccaccctgtacgccgtgctggtgtctgccctggtgctgatggctatggtcaagcggaaggacagccggggaagggccaagcgatctggatctggagcaacaaacttctcactactcaaacaagcaggtgacgtggaggagaatcccgggcctactagtgccaccatggactggatttggcgcatccttttccttgtcggcgctgctaccggcgcccattccttcgaacaagttcagcttcaacagcctggcgctgagctggtcaaacctggcgcttctgtgaagatgagctgcaaagccagcggctacgccttcagcagctactggatcaactggatgaagcagaaacccggccagggactcgaatggatcggccaaatctatcccggcgacggcgacaccaactacaacggcaagttcaagggcagagccacactgaccgccgatacctctagcagcacagcctacatgcagctgagcagcctgaccagcgaagatagcgccgtgtacttctgtgcccggtccatcacaacagtcgtgggctgcgctatggactattggggccagggaacaagcgtgaccgtgtctagtacgcgtatccagaaccctgatcctgccgtgtaccagctgcgggatagcaagagcagcgacaagagcgtgtgtctgttcaccgacttcgacagccagaccaacgtgtcccagagcaaggactccgacgtgtacatcaccgataagtgcgtgctggacatgcggagcatggacttcaagagcaactccgccgtggcctggtccaacaagtccgatttcgcctgcgccaacgccttcaacaacagcattatccccgaggacacattcttcccaagccccgagagcagctgcgacgtgaagctggtggaaaagagcttcgagacagacaccaacctgaacttccagaacctgagcgtgatcggcttcagaatcctgctgctgaaagtggccggctttaacctgctgatgaccctgcggctgtggtccagctaa

SEQ ID NO: 8258 - DNA, 1962 bp, synthetic construct
  source 1..1962: mol_type = other DNA
atggccttaccagtgaccgccttgctcctgccgctggccttgctgctccacgccgccaggccggcatgcgcccgcagcgagtaccgctacaagggtaccggcggaggcggatctggcggcggaggtagcggtggcggaggatctgaattcgacatccagatgacacagagccctagcagcctgtctgccagcgtgggagacagagtgaccatcacatgcaaggccagcgaccacatcaacaactggctggcctggtatcagcagaagcctggacaggcccctaagctgctgatctacggcgctaccacactggaaacaggcgtgcccagcagattttctggcagcggctctggcaccgactacaccctgacaatatccagcctccagcctgaggacttcgccacctactactgtcagcagagctggaacaccccttggacattcggccagggcaccaagctggaaatcaagagactcgaggacctgaagaacgtgttcccacctgaggtggccgtgttcgagcctagcgaggccgagatcagccacacccagaaagccaccctcgtgtgcctggctaccggcttctaccccgaccatgtggaactgtcttggtgggtcaacggcaaagaggtgcacagcggcgtgtgtaccgacccccagccactgaaagaacagcccgccctgaacgacagccggtactgcctgagcagcagactgagagtgtccgccaccttctggcagaacccccggaaccacttcagatgccaggtgcagttctacggcctgagcgagaacgacgagtggacccaggacagagccaagcccgtgacccagatcgtgtctgccgaagcctggggcagagccgattgcggctttaccagcgagagctaccagcagggcgtgctgagcgccaccatcctgtacgagatcctgctgggcaaggccaccctgtacgccgtgctggtgtctgccctggtgctgatggctatggtcaagcggaaggacagccggggaagggccaagcgatctggatctggagcaacaaacttctcactactcaaacaagcaggtgacgtggaggagaatcccgggcctactagtgccaccatggactggatttggcgcatccttttccttgtcggcgctgctaccggcgcccattccttcgaacaagttcagcttcaacagcctggcgctgagctggtcaaacctggcgcttctgtgaagatgagctgcaaagccagcggctacgccttcagcagctactggatcaactggatgaagcagaaacccggccagggactcgaatggatcggccaaatctatcccggcgacggcgacaccaactacaacggcaagttcaagggcagagccacactgaccgccgatacctctagcagcacagcctacatgcagctgagcagcctgaccagcgaagatagcgccgtgtacttctgtgcccggtccatcacaacagtcgtgggctgcgctatggactattggggccagggaacaagcgtgaccgtgtctagtacgcgtatccagaaccctgatcctgccgtgtaccagctgcgggatagcaagagcagcgacaagagcgtgtgtctgttcaccgacttcgacagccagaccaacgtgtcccagagcaaggactccgacgtgtacatcaccgataagtgcgtgctggacatgcggagcatggacttcaagagcaactccgccgtggcctggtccaacaagtccgatttcgcctgcgccaacgccttcaacaacagcattatccccgaggacacattcttcccaagccccgagagcagctgcgacgtgaagctggtggaaaagagcttcgagacagacaccaacctgaacttccagaacctgagcgtgatcggcttcagaatcctgctgctgaaagtggccggctttaacctgctgatgaccctgcggctgtggtccagctaa

SEQ ID NO: 8259 - DNA, 1962 bp, synthetic construct
  source 1..1962: mol_type = other DNA
atggccttaccagtgaccgccttgctcctgccgctggccttgctgctccacgccgccaggccggcatgcgcccgcagcgagcgccgctacaagggtaccggcggaggcggatctggcggcggaggtagcggtggcggaggatctgaattcgacatccagatgacacagagccctagcagcctgtctgccagcgtgggagacagagtgaccatcacatgcaaggccagcgaccacatcaacaactggctggcctggtatcagcagaagcctggacaggcccctaagctgctgatctacggcgctaccacactggaaacaggcgtgcccagcagattttctggcagcggctctggcaccgactacaccctgacaatatccagcctccagcctgaggacttcgccacctactactgtcagcagagctggaacaccccttggacattcggccagggcaccaagctggaaatcaagagactcgaggacctgaagaacgtgttcccacctgaggtggccgtgttcgagcctagcgaggccgagatcagccacacccagaaagccaccctcgtgtgcctggctaccggcttctaccccgaccatgtggaactgtcttggtgggtcaacggcaaagaggtgcacagcggcgtgtgtaccgacccccagccactgaaagaacagcccgccctgaacgacagccggtactgcctgagcagcagactgagagtgtccgccaccttctggcagaacccccggaaccacttcagatgccaggtgcagttctacggcctgagcgagaacgacgagtggacccaggacagagccaagcccgtgacccagatcgtgtctgccgaagcctggggcagagccgattgcggctttaccagcgagagctaccagcagggcgtgctgagcgccaccatcctgtacgagatcctgctgggcaaggccaccctgtacgccgtgctggtgtctgccctggtgctgatggctatggtcaagcggaaggacagccggggaagggccaagcgatctggatctggagcaacaaacttctcactactcaaacaagcaggtgacgtggaggagaatcccgggcctactagtgccaccatggactggatttggcgcatccttttccttgtcggcgctgctaccggcgcccattccttcgaacaagttcagcttcaacagcctggcgctgagctggtcaaacctggcgcttctgtgaagatgagctgcaaagccagcggctacgccttcagcagctactggatcaactggatgaagcagaaacccggccagggactcgaatggatcggccaaatctatcccggcgacggcgacaccaactacaacggcaagttcaagggcagagccacactgaccgccgatacctctagcagcacagcctacatgcagctgagcagcctgaccagcgaagatagcgccgtgtacttctgtgcccggtccatcacaacagtcgtgggctgcgctatggactattggggccagggaacaagcgtgaccgtgtctagtacgcgtatccagaaccctgatcctgccgtgtaccagctgcgggatagcaagagcagcgacaagagcgtgtgtctgttcaccgacttcgacagccagaccaacgtgtcccagagcaaggactccgacgtgtacatcaccgataagtgcgtgctggacatgcggagcatggacttcaagagcaactccgccgtggcctggtccaacaagtccgatttcgcctgcgccaacgccttcaacaacagcattatccccgaggacacattcttcccaagccccgagagcagctgcgacgtgaagctggtggaaaagagcttcgagacagacaccaacctgaacttccagaacctgagcgtgatcggcttcagaatcctgctgctgaaagtggccggctttaacctgctgatgaccctgcggctgtggtccagctaa

SEQ ID NO: 8260 - DNA, 1962 bp, synthetic construct
  source 1..1962: mol_type = other DNA
atggccttaccagtgaccgccttgctcctgccgctggccttgctgctccacgccgccaggccggcatgcgcccgcagcgaggtgcgctacaagggtaccggcggaggcggatctggcggcggaggtagcggtggcggaggatctgaattcgacatccagatgacacagagccctagcagcctgtctgccagcgtgggagacagagtgaccatcacatgcaaggccagcgaccacatcaacaactggctggcctggtatcagcagaagcctggacaggcccctaagctgctgatctacggcgctaccacactggaaacaggcgtgcccagcagattttctggcagcggctctggcaccgactacaccctgacaatatccagcctccagcctgaggacttcgccacctactactgtcagcagagctggaacaccccttggacattcggccagggcaccaagctggaaatcaagagactcgaggacctgaagaacgtgttcccacctgaggtggccgtgttcgagcctagcgaggccgagatcagccacacccagaaagccaccctcgtgtgcctggctaccggcttctaccccgaccatgtggaactgtcttggtgggtcaacggcaaagaggtgcacagcggcgtgtgtaccgacccccagccactgaaagaacagcccgccctgaacgacagccggtactgcctgagcagcagactgagagtgtccgccaccttctggcagaacccccggaaccacttcagatgccaggtgcagttctacggcctgagcgagaacgacgagtggacccaggacagagccaagcccgtgacccagatcgtgtctgccgaagcctggggcagagccgattgcggctttaccagcgagagctaccagcagggcgtgctgagcgccaccatcctgtacgagatcctgctgggcaaggccaccctgtacgccgtgctggtgtctgccctggtgctgatggctatggtcaagcggaaggacagccggggaagggccaagcgatctggatctggagcaacaaacttctcactactcaaacaagcaggtgacgtggaggagaatcccgggcctactagtgccaccatggactggatttggcgcatccttttccttgtcggcgctgctaccggcgcccattccttcgaacaagttcagcttcaacagcctggcgctgagctggtcaaacctggcgcttctgtgaagatgagctgcaaagccagcggctacgccttcagcagctactggatcaactggatgaagcagaaacccggccagggactcgaatggatcggccaaatctatcccggcgacggcgacaccaactacaacggcaagttcaagggcagagccacactgaccgccgatacctctagcagcacagcctacatgcagctgagcagcctgaccagcgaagatagcgccgtgtacttctgtgcccggtccatcacaacagtcgtgggctgcgctatggactattggggccagggaacaagcgtgaccgtgtctagtacgcgtatccagaaccctgatcctgccgtgtaccagctgcgggatagcaagagcagcgacaagagcgtgtgtctgttcaccgacttcgacagccagaccaacgtgtcccagagcaaggactccgacgtgtacatcaccgataagtgcgtgctggacatgcggagcatggacttcaagagcaactccgccgtggcctggtccaacaagtccgatttcgcctgcgccaacgccttcaacaacagcattatccccgaggacacattcttcccaagccccgagagcagctgcgacgtgaagctggtggaaaagagcttcgagacagacaccaacctgaacttccagaacctgagcgtgatcggcttcagaatcctgctgctgaaagtggccggctttaacctgctgatgaccctgcggctgtggtccagctaa

SEQ ID NO: 8261 - DNA, 1962 bp, synthetic construct
  source 1..1962: mol_type = other DNA
atggccttaccagtgaccgccttgctcctgccgctggccttgctgctccacgccgccaggccggcatgcgcccgcatcgaggaccgctacaagggtaccggcggaggcggatctggcggcggaggtagcggtggcggaggatctgaattcgacatccagatgacacagagccctagcagcctgtctgccagcgtgggagacagagtgaccatcacatgcaaggccagcgaccacatcaacaactggctggcctggtatcagcagaagcctggacaggcccctaagctgctgatctacggcgctaccacactggaaacaggcgtgcccagcagattttctggcagcggctctggcaccgactacaccctgacaatatccagcctccagcctgaggacttcgccacctactactgtcagcagagctggaacaccccttggacattcggccagggcaccaagctggaaatcaagagactcgaggacctgaagaacgtgttcccacctgaggtggccgtgttcgagcctagcgaggccgagatcagccacacccagaaagccaccctcgtgtgcctggctaccggcttctaccccgaccatgtggaactgtcttggtgggtcaacggcaaagaggtgcacagcggcgtgtgtaccgacccccagccactgaaagaacagcccgccctgaacgacagccggtactgcctgagcagcagactgagagtgtccgccaccttctggcagaacccccggaaccacttcagatgccaggtgcagttctacggcctgagcgagaacgacgagtggacccaggacagagccaagcccgtgacccagatcgtgtctgccgaagcctggggcagagccgattgcggctttaccagcgagagctaccagcagggcgtgctgagcgccaccatcctgtacgagatcctgctgggcaaggccaccctgtacgccgtgctggtgtctgccctggtgctgatggctatggtcaagcggaaggacagccggggaagggccaagcgatctggatctggagcaacaaacttctcactactcaaacaagcaggtgacgtggaggagaatcccgggcctactagtgccaccatggactggatttggcgcatccttttccttgtcggcgctgctaccggcgcccattccttcgaacaagttcagcttcaacagcctggcgctgagctggtcaaacctggcgcttctgtgaagatgagctgcaaagccagcggctacgccttcagcagctactggatcaactggatgaagcagaaacccggccagggactcgaatggatcggccaaatctatcccggcgacggcgacaccaactacaacggcaagttcaagggcagagccacactgaccgccgatacctctagcagcacagcctacatgcagctgagcagcctgaccagcgaagatagcgccgtgtacttctgtgcccggtccatcacaacagtcgtgggctgcgctatggactattggggccagggaacaagcgtgaccgtgtctagtacgcgtatccagaaccctgatcctgccgtgtaccagctgcgggatagcaagagcagcgacaagagcgtgtgtctgttcaccgacttcgacagccagaccaacgtgtcccagagcaaggactccgacgtgtacatcaccgataagtgcgtgctggacatgcggagcatggacttcaagagcaactccgccgtggcctggtccaacaagtccgatttcgcctgcgccaacgccttcaacaacagcattatccccgaggacacattcttcccaagccccgagagcagctgcgacgtgaagctggtggaaaagagcttcgagacagacaccaacctgaacttccagaacctgagcgtgatcggcttcagaatcctgctgctgaaagtggccggctttaacctgctgatgaccctgcggctgtggtccagctaa

SEQ ID NO: 8262 - DNA, 1962 bp, synthetic construct
  source 1..1962: mol_type = other DNA
atggccttaccagtgaccgccttgctcctgccgctggccttgctgctccacgccgccaggccggcatgcgcccgcctggaggaccgctacaagggtaccggcggaggcggatctggcggcggaggtagcggtggcggaggatctgaattcgacatccagatgacacagagccctagcagcctgtctgccagcgtgggagacagagtgaccatcacatgcaaggccagcgaccacatcaacaactggctggcctggtatcagcagaagcctggacaggcccctaagctgctgatctacggcgctaccacactggaaacaggcgtgcccagcagattttctggcagcggctctggcaccgactacaccctgacaatatccagcctccagcctgaggacttcgccacctactactgtcagcagagctggaacaccccttggacattcggccagggcaccaagctggaaatcaagagactcgaggacctgaagaacgtgttcccacctgaggtggccgtgttcgagcctagcgaggccgagatcagccacacccagaaagccaccctcgtgtgcctggctaccggcttctaccccgaccatgtggaactgtcttggtgggtcaacggcaaagaggtgcacagcggcgtgtgtaccgacccccagccactgaaagaacagcccgccctgaacgacagccggtactgcctgagcagcagactgagagtgtccgccaccttctggcagaacccccggaaccacttcagatgccaggtgcagttctacggcctgagcgagaacgacgagtggacccaggacagagccaagcccgtgacccagatcgtgtctgccgaagcctggggcagagccgattgcggctttaccagcgagagctaccagcagggcgtgctgagcgccaccatcctgtacgagatcctgctgggcaaggccaccctgtacgccgtgctggtgtctgccctggtgctgatggctatggtcaagcggaaggacagccggggaagggccaagcgatctggatctggagcaacaaacttctcactactcaaacaagcaggtgacgtggaggagaatcccgggcctactagtgccaccatggactggatttggcgcatccttttccttgtcggcgctgctaccggcgcccattccttcgaacaagttcagcttcaacagcctggcgctgagctggtcaaacctggcgcttctgtgaagatgagctgcaaagccagcggctacgccttcagcagctactggatcaactggatgaagcagaaacccggccagggactcgaatggatcggccaaatctatcccggcgacggcgacaccaactacaacggcaagttcaagggcagagccacactgaccgccgatacctctagcagcacagcctacatgcagctgagcagcctgaccagcgaagatagcgccgtgtacttctgtgcccggtccatcacaacagtcgtgggctgcgctatggactattggggccagggaacaagcgtgaccgtgtctagtacgcgtatccagaaccctgatcctgccgtgtaccagctgcgggatagcaagagcagcgacaagagcgtgtgtctgttcaccgacttcgacagccagaccaacgtgtcccagagcaaggactccgacgtgtacatcaccgataagtgcgtgctggacatgcggagcatggacttcaagagcaactccgccgtggcctggtccaacaagtccgatttcgcctgcgccaacgccttcaacaacagcattatccccgaggacacattcttcccaagccccgagagcagctgcgacgtgaagctggtggaaaagagcttcgagacagacaccaacctgaacttccagaacctgagcgtgatcggcttcagaatcctgctgctgaaagtggccggctttaacctgctgatgaccctgcggctgtggtccagctaa

SEQ ID NO: 8263 - DNA, 1962 bp, synthetic construct
  source 1..1962: mol_type = other DNA
atggccttaccagtgaccgccttgctcctgccgctggccttgctgctccacgccgccaggccggcatgcgcccgcatggaggaccgctacaagggtaccggcggaggcggatctggcggcggaggtagcggtggcggaggatctgaattcgacatccagatgacacagagccctagcagcctgtctgccagcgtgggagacagagtgaccatcacatgcaaggccagcgaccacatcaacaactggctggcctggtatcagcagaagcctggacaggcccctaagctgctgatctacggcgctaccacactggaaacaggcgtgcccagcagattttctggcagcggctctggcaccgactacaccctgacaatatccagcctccagcctgaggacttcgccacctactactgtcagcagagctggaacaccccttggacattcggccagggcaccaagctggaaatcaagagactcgaggacctgaagaacgtgttcccacctgaggtggccgtgttcgagcctagcgaggccgagatcagccacacccagaaagccaccctcgtgtgcctggctaccggcttctaccccgaccatgtggaactgtcttggtgggtcaacggcaaagaggtgcacagcggcgtgtgtaccgacccccagccactgaaagaacagcccgccctgaacgacagccggtactgcctgagcagcagactgagagtgtccgccaccttctggcagaacccccggaaccacttcagatgccaggtgcagttctacggcctgagcgagaacgacgagtggacccaggacagagccaagcccgtgacccagatcgtgtctgccgaagcctggggcagagccgattgcggctttaccagcgagagctaccagcagggcgtgctgagcgccaccatcctgtacgagatcctgctgggcaaggccaccctgtacgccgtgctggtgtctgccctggtgctgatggctatggtcaagcggaaggacagccggggaagggccaagcgatctggatctggagcaacaaacttctcactactcaaacaagcaggtgacgtggaggagaatcccgggcctactagtgccaccatggactggatttggcgcatccttttccttgtcggcgctgctaccggcgcccattccttcgaacaagttcagcttcaacagcctggcgctgagctggtcaaacctggcgcttctgtgaagatgagctgcaaagccagcggctacgccttcagcagctactggatcaactggatgaagcagaaacccggccagggactcgaatggatcggccaaatctatcccggcgacggcgacaccaactacaacggcaagttcaagggcagagccacactgaccgccgatacctctagcagcacagcctacatgcagctgagcagcctgaccagcgaagatagcgccgtgtacttctgtgcccggtccatcacaacagtcgtgggctgcgctatggactattggggccagggaacaagcgtgaccgtgtctagtacgcgtatccagaaccctgatcctgccgtgtaccagctgcgggatagcaagagcagcgacaagagcgtgtgtctgttcaccgacttcgacagccagaccaacgtgtcccagagcaaggactccgacgtgtacatcaccgataagtgcgtgctggacatgcggagcatggacttcaagagcaactccgccgtggcctggtccaacaagtccgatttcgcctgcgccaacgccttcaacaacagcattatccccgaggacacattcttcccaagccccgagagcagctgcgacgtgaagctggtggaaaagagcttcgagacagacaccaacctgaacttccagaacctgagcgtgatcggcttcagaatcctgctgctgaaagtggccggctttaacctgctgatgaccctgcggctgtggtccagctaa

SEQ ID NO: 8264 - DNA, 1962 bp, synthetic construct
  source 1..1962: mol_type = other DNA
atggccttaccagtgaccgccttgctcctgccgctggccttgctgctccacgccgccaggccggcatgcgcccgcgtggaggaccgctacaagggtaccggcggaggcggatctggcggcggaggtagcggtggcggaggatctgaattcgacatccagatgacacagagccctagcagcctgtctgccagcgtgggagacagagtgaccatcacatgcaaggccagcgaccacatcaacaactggctggcctggtatcagcagaagcctggacaggcccctaagctgctgatctacggcgctaccacactggaaacaggcgtgcccagcagattttctggcagcggctctggcaccgactacaccctgacaatatccagcctccagcctgaggacttcgccacctactactgtcagcagagctggaacaccccttggacattcggccagggcaccaagctggaaatcaagagactcgaggacctgaagaacgtgttcccacctgaggtggccgtgttcgagcctagcgaggccgagatcagccacacccagaaagccaccctcgtgtgcctggctaccggcttctaccccgaccatgtggaactgtcttggtgggtcaacggcaaagaggtgcacagcggcgtgtgtaccgacccccagccactgaaagaacagcccgccctgaacgacagccggtactgcctgagcagcagactgagagtgtccgccaccttctggcagaacccccggaaccacttcagatgccaggtgcagttctacggcctgagcgagaacgacgagtggacccaggacagagccaagcccgtgacccagatcgtgtctgccgaagcctggggcagagccgattgcggctttaccagcgagagctaccagcagggcgtgctgagcgccaccatcctgtacgagatcctgctgggcaaggccaccctgtacgccgtgctggtgtctgccctggtgctgatggctatggtcaagcggaaggacagccggggaagggccaagcgatctggatctggagcaacaaacttctcactactcaaacaagcaggtgacgtggaggagaatcccgggcctactagtgccaccatggactggatttggcgcatccttttccttgtcggcgctgctaccggcgcccattccttcgaacaagttcagcttcaacagcctggcgctgagctggtcaaacctggcgcttctgtgaagatgagctgcaaagccagcggctacgccttcagcagctactggatcaactggatgaagcagaaacccggccagggactcgaatggatcggccaaatctatcccggcgacggcgacaccaactacaacggcaagttcaagggcagagccacactgaccgccgatacctctagcagcacagcctacatgcagctgagcagcctgaccagcgaagatagcgccgtgtacttctgtgcccggtccatcacaacagtcgtgggctgcgctatggactattggggccagggaacaagcgtgaccgtgtctagtacgcgtatccagaaccctgatcctgccgtgtaccagctgcgggatagcaagagcagcgacaagagcgtgtgtctgttcaccgacttcgacagccagaccaacgtgtcccagagcaaggactccgacgtgtacatcaccgataagtgcgtgctggacatgcggagcatggacttcaagagcaactccgccgtggcctggtccaacaagtccgatttcgcctgcgccaacgccttcaacaacagcattatccccgaggacacattcttcccaagccccgagagcagctgcgacgtgaagctggtggaaaagagcttcgagacagacaccaacctgaacttccagaacctgagcgtgatcggcttcagaatcctgctgctgaaagtggccggctttaacctgctgatgaccctgcggctgtggtccagctaa

SEQ ID NO: 8265 - DNA, 1962 bp, synthetic construct
  source 1..1962: mol_type = other DNA
atggccttaccagtgaccgccttgctcctgccgctggccttgctgctccacgccgccaggccggcatgcgcccgcgccgaggaccgctacaagggtaccggcggaggcggatctggcggcggaggtagcggtggcggaggatctgaattcgacatccagatgacacagagccctagcagcctgtctgccagcgtgggagacagagtgaccatcacatgcaaggccagcgaccacatcaacaactggctggcctggtatcagcagaagcctggacaggcccctaagctgctgatctacggcgctaccacactggaaacaggcgtgcccagcagattttctggcagcggctctggcaccgactacaccctgacaatatccagcctccagcctgaggacttcgccacctactactgtcagcagagctggaacaccccttggacattcggccagggcaccaagctggaaatcaagagactcgaggacctgaagaacgtgttcccacctgaggtggccgtgttcgagcctagcgaggccgagatcagccacacccagaaagccaccctcgtgtgcctggctaccggcttctaccccgaccatgtggaactgtcttggtgggtcaacggcaaagaggtgcacagcggcgtgtgtaccgacccccagccactgaaagaacagcccgccctgaacgacagccggtactgcctgagcagcagactgagagtgtccgccaccttctggcagaacccccggaaccacttcagatgccaggtgcagttctacggcctgagcgagaacgacgagtggacccaggacagagccaagcccgtgacccagatcgtgtctgccgaagcctggggcagagccgattgcggctttaccagcgagagctaccagcagggcgtgctgagcgccaccatcctgtacgagatcctgctgggcaaggccaccctgtacgccgtgctggtgtctgccctggtgctgatggctatggtcaagcggaaggacagccggggaagggccaagcgatctggatctggagcaacaaacttctcactactcaaacaagcaggtgacgtggaggagaatcccgggcctactagtgccaccatggactggatttggcgcatccttttccttgtcggcgctgctaccggcgcccattccttcgaacaagttcagcttcaacagcctggcgctgagctggtcaaacctggcgcttctgtgaagatgagctgcaaagccagcggctacgccttcagcagctactggatcaactggatgaagcagaaacccggccagggactcgaatggatcggccaaatctatcccggcgacggcgacaccaactacaacggcaagttcaagggcagagccacactgaccgccgatacctctagcagcacagcctacatgcagctgagcagcctgaccagcgaagatagcgccgtgtacttctgtgcccggtccatcacaacagtcgtgggctgcgctatggactattggggccagggaacaagcgtgaccgtgtctagtacgcgtatccagaaccctgatcctgccgtgtaccagctgcgggatagcaagagcagcgacaagagcgtgtgtctgttcaccgacttcgacagccagaccaacgtgtcccagagcaaggactccgacgtgtacatcaccgataagtgcgtgctggacatgcggagcatggacttcaagagcaactccgccgtggcctggtccaacaagtccgatttcgcctgcgccaacgccttcaacaacagcattatccccgaggacacattcttcccaagccccgagagcagctgcgacgtgaagctggtggaaaagagcttcgagacagacaccaacctgaacttccagaacctgagcgtgatcggcttcagaatcctgctgctgaaagtggccggctttaacctgctgatgaccctgcggctgtggtccagctaa

SEQ ID NO: 8266 - DNA, 1962 bp, synthetic construct
  source 1..1962: mol_type = other DNA
atggccttaccagtgaccgccttgctcctgccgctggccttgctgctccacgccgccaggccggcatgcgcccgcttcgaggaccgctacaagggtaccggcggaggcggatctggcggcggaggtagcggtggcggaggatctgaattcgacatccagatgacacagagccctagcagcctgtctgccagcgtgggagacagagtgaccatcacatgcaaggccagcgaccacatcaacaactggctggcctggtatcagcagaagcctggacaggcccctaagctgctgatctacggcgctaccacactggaaacaggcgtgcccagcagattttctggcagcggctctggcaccgactacaccctgacaatatccagcctccagcctgaggacttcgccacctactactgtcagcagagctggaacaccccttggacattcggccagggcaccaagctggaaatcaagagactcgaggacctgaagaacgtgttcccacctgaggtggccgtgttcgagcctagcgaggccgagatcagccacacccagaaagccaccctcgtgtgcctggctaccggcttctaccccgaccatgtggaactgtcttggtgggtcaacggcaaagaggtgcacagcggcgtgtgtaccgacccccagccactgaaagaacagcccgccctgaacgacagccggtactgcctgagcagcagactgagagtgtccgccaccttctggcagaacccccggaaccacttcagatgccaggtgcagttctacggcctgagcgagaacgacgagtggacccaggacagagccaagcccgtgacccagatcgtgtctgccgaagcctggggcagagccgattgcggctttaccagcgagagctaccagcagggcgtgctgagcgccaccatcctgtacgagatcctgctgggcaaggccaccctgtacgccgtgctggtgtctgccctggtgctgatggctatggtcaagcggaaggacagccggggaagggccaagcgatctggatctggagcaacaaacttctcactactcaaacaagcaggtgacgtggaggagaatcccgggcctactagtgccaccatggactggatttggcgcatccttttccttgtcggcgctgctaccggcgcccattccttcgaacaagttcagcttcaacagcctggcgctgagctggtcaaacctggcgcttctgtgaagatgagctgcaaagccagcggctacgccttcagcagctactggatcaactggatgaagcagaaacccggccagggactcgaatggatcggccaaatctatcccggcgacggcgacaccaactacaacggcaagttcaagggcagagccacactgaccgccgatacctctagcagcacagcctacatgcagctgagcagcctgaccagcgaagatagcgccgtgtacttctgtgcccggtccatcacaacagtcgtgggctgcgctatggactattggggccagggaacaagcgtgaccgtgtctagtacgcgtatccagaaccctgatcctgccgtgtaccagctgcgggatagcaagagcagcgacaagagcgtgtgtctgttcaccgacttcgacagccagaccaacgtgtcccagagcaaggactccgacgtgtacatcaccgataagtgcgtgctggacatgcggagcatggacttcaagagcaactccgccgtggcctggtccaacaagtccgatttcgcctgcgccaacgccttcaacaacagcattatccccgaggacacattcttcccaagccccgagagcagctgcgacgtgaagctggtggaaaagagcttcgagacagacaccaacctgaacttccagaacctgagcgtgatcggcttcagaatcctgctgctgaaagtggccggctttaacctgctgatgaccctgcggctgtggtccagctaa

SEQ ID NO: 8267 - DNA, 1962 bp, synthetic construct
  source 1..1962: mol_type = other DNA
atggccttaccagtgaccgccttgctcctgccgctggccttgctgctccacgccgccaggccggcatgcgcccgccacgaggaccgctacaagggtaccggcggaggcggatctggcggcggaggtagcggtggcggaggatctgaattcgacatccagatgacacagagccctagcagcctgtctgccagcgtgggagacagagtgaccatcacatgcaaggccagcgaccacatcaacaactggctggcctggtatcagcagaagcctggacaggcccctaagctgctgatctacggcgctaccacactggaaacaggcgtgcccagcagattttctggcagcggctctggcaccgactacaccctgacaatatccagcctccagcctgaggacttcgccacctactactgtcagcagagctggaacaccccttggacattcggccagggcaccaagctggaaatcaagagactcgaggacctgaagaacgtgttcccacctgaggtggccgtgttcgagcctagcgaggccgagatcagccacacccagaaagccaccctcgtgtgcctggctaccggcttctaccccgaccatgtggaactgtcttggtgggtcaacggcaaagaggtgcacagcggcgtgtgtaccgacccccagccactgaaagaacagcccgccctgaacgacagccggtactgcctgagcagcagactgagagtgtccgccaccttctggcagaacccccggaaccacttcagatgccaggtgcagttctacggcctgagcgagaacgacgagtggacccaggacagagccaagcccgtgacccagatcgtgtctgccgaagcctggggcagagccgattgcggctttaccagcgagagctaccagcagggcgtgctgagcgccaccatcctgtacgagatcctgctgggcaaggccaccctgtacgccgtgctggtgtctgccctggtgctgatggctatggtcaagcggaaggacagccggggaagggccaagcgatctggatctggagcaacaaacttctcactactcaaacaagcaggtgacgtggaggagaatcccgggcctactagtgccaccatggactggatttggcgcatccttttccttgtcggcgctgctaccggcgcccattccttcgaacaagttcagcttcaacagcctggcgctgagctggtcaaacctggcgcttctgtgaagatgagctgcaaagccagcggctacgccttcagcagctactggatcaactggatgaagcagaaacccggccagggactcgaatggatcggccaaatctatcccggcgacggcgacaccaactacaacggcaagttcaagggcagagccacactgaccgccgatacctctagcagcacagcctacatgcagctgagcagcctgaccagcgaagatagcgccgtgtacttctgtgcccggtccatcacaacagtcgtgggctgcgctatggactattggggccagggaacaagcgtgaccgtgtctagtacgcgtatccagaaccctgatcctgccgtgtaccagctgcgggatagcaagagcagcgacaagagcgtgtgtctgttcaccgacttcgacagccagaccaacgtgtcccagagcaaggactccgacgtgtacatcaccgataagtgcgtgctggacatgcggagcatggacttcaagagcaactccgccgtggcctggtccaacaagtccgatttcgcctgcgccaacgccttcaacaacagcattatccccgaggacacattcttcccaagccccgagagcagctgcgacgtgaagctggtggaaaagagcttcgagacagacaccaacctgaacttccagaacctgagcgtgatcggcttcagaatcctgctgctgaaagtggccggctttaacctgctgatgaccctgcggctgtggtccagctaa

SEQ ID NO: 8268 - DNA, 1962 bp, synthetic construct
  source 1..1962: mol_type = other DNA
atggccttaccagtgaccgccttgctcctgccgctggccttgctgctccacgccgccaggccggcatgcgcccgcggcgaggaccgctacaagggtaccggcggaggcggatctggcggcggaggtagcggtggcggaggatctgaattcgacatccagatgacacagagccctagcagcctgtctgccagcgtgggagacagagtgaccatcacatgcaaggccagcgaccacatcaacaactggctggcctggtatcagcagaagcctggacaggcccctaagctgctgatctacggcgctaccacactggaaacaggcgtgcccagcagattttctggcagcggctctggcaccgactacaccctgacaatatccagcctccagcctgaggacttcgccacctactactgtcagcagagctggaacaccccttggacattcggccagggcaccaagctggaaatcaagagactcgaggacctgaagaacgtgttcccacctgaggtggccgtgttcgagcctagcgaggccgagatcagccacacccagaaagccaccctcgtgtgcctggctaccggcttctaccccgaccatgtggaactgtcttggtgggtcaacggcaaagaggtgcacagcggcgtgtgtaccgacccccagccactgaaagaacagcccgccctgaacgacagccggtactgcctgagcagcagactgagagtgtccgccaccttctggcagaacccccggaaccacttcagatgccaggtgcagttctacggcctgagcgagaacgacgagtggacccaggacagagccaagcccgtgacccagatcgtgtctgccgaagcctggggcagagccgattgcggctttaccagcgagagctaccagcagggcgtgctgagcgccaccatcctgtacgagatcctgctgggcaaggccaccctgtacgccgtgctggtgtctgccctggtgctgatggctatggtcaagcggaaggacagccggggaagggccaagcgatctggatctggagcaacaaacttctcactactcaaacaagcaggtgacgtggaggagaatcccgggcctactagtgccaccatggactggatttggcgcatccttttccttgtcggcgctgctaccggcgcccattccttcgaacaagttcagcttcaacagcctggcgctgagctggtcaaacctggcgcttctgtgaagatgagctgcaaagccagcggctacgccttcagcagctactggatcaactggatgaagcagaaacccggccagggactcgaatggatcggccaaatctatcccggcgacggcgacaccaactacaacggcaagttcaagggcagagccacactgaccgccgatacctctagcagcacagcctacatgcagctgagcagcctgaccagcgaagatagcgccgtgtacttctgtgcccggtccatcacaacagtcgtgggctgcgctatggactattggggccagggaacaagcgtgaccgtgtctagtacgcgtatccagaaccctgatcctgccgtgtaccagctgcgggatagcaagagcagcgacaagagcgtgtgtctgttcaccgacttcgacagccagaccaacgtgtcccagagcaaggactccgacgtgtacatcaccgataagtgcgtgctggacatgcggagcatggacttcaagagcaactccgccgtggcctggtccaacaagtccgatttcgcctgcgccaacgccttcaacaacagcattatccccgaggacacattcttcccaagccccgagagcagctgcgacgtgaagctggtggaaaagagcttcgagacagacaccaacctgaacttccagaacctgagcgtgatcggcttcagaatcctgctgctgaaagtggccggctttaacctgctgatgaccctgcggctgtggtccagctaa

SEQ ID NO: 8269 - DNA, 1962 bp, synthetic construct
  source 1..1962: mol_type = other DNA
atggccttaccagtgaccgccttgctcctgccgctggccttgctgctccacgccgccaggccggcatgcgcccgcaccgaggaccgctacaagggtaccggcggaggcggatctggcggcggaggtagcggtggcggaggatctgaattcgacatccagatgacacagagccctagcagcctgtctgccagcgtgggagacagagtgaccatcacatgcaaggccagcgaccacatcaacaactggctggcctggtatcagcagaagcctggacaggcccctaagctgctgatctacggcgctaccacactggaaacaggcgtgcccagcagattttctggcagcggctctggcaccgactacaccctgacaatatccagcctccagcctgaggacttcgccacctactactgtcagcagagctggaacaccccttggacattcggccagggcaccaagctggaaatcaagagactcgaggacctgaagaacgtgttcccacctgaggtggccgtgttcgagcctagcgaggccgagatcagccacacccagaaagccaccctcgtgtgcctggctaccggcttctaccccgaccatgtggaactgtcttggtgggtcaacggcaaagaggtgcacagcggcgtgtgtaccgacccccagccactgaaagaacagcccgccctgaacgacagccggtactgcctgagcagcagactgagagtgtccgccaccttctggcagaacccccggaaccacttcagatgccaggtgcagttctacggcctgagcgagaacgacgagtggacccaggacagagccaagcccgtgacccagatcgtgtctgccgaagcctggggcagagccgattgcggctttaccagcgagagctaccagcagggcgtgctgagcgccaccatcctgtacgagatcctgctgggcaaggccaccctgtacgccgtgctggtgtctgccctggtgctgatggctatggtcaagcggaaggacagccggggaagggccaagcgatctggatctggagcaacaaacttctcactactcaaacaagcaggtgacgtggaggagaatcccgggcctactagtgccaccatggactggatttggcgcatccttttccttgtcggcgctgctaccggcgcccattccttcgaacaagttcagcttcaacagcctggcgctgagctggtcaaacctggcgcttctgtgaagatgagctgcaaagccagcggctacgccttcagcagctactggatcaactggatgaagcagaaacccggccagggactcgaatggatcggccaaatctatcccggcgacggcgacaccaactacaacggcaagttcaagggcagagccacactgaccgccgatacctctagcagcacagcctacatgcagctgagcagcctgaccagcgaagatagcgccgtgtacttctgtgcccggtccatcacaacagtcgtgggctgcgctatggactattggggccagggaacaagcgtgaccgtgtctagtacgcgtatccagaaccctgatcctgccgtgtaccagctgcgggatagcaagagcagcgacaagagcgtgtgtctgttcaccgacttcgacagccagaccaacgtgtcccagagcaaggactccgacgtgtacatcaccgataagtgcgtgctggacatgcggagcatggacttcaagagcaactccgccgtggcctggtccaacaagtccgatttcgcctgcgccaacgccttcaacaacagcattatccccgaggacacattcttcccaagccccgagagcagctgcgacgtgaagctggtggaaaagagcttcgagacagacaccaacctgaacttccagaacctgagcgtgatcggcttcagaatcctgctgctgaaagtggccggctttaacctgctgatgaccctgcggctgtggtccagctaa

SEQ ID NO: 8270 - DNA, 1962 bp, synthetic construct
  source 1..1962: mol_type = other DNA
atggccttaccagtgaccgccttgctcctgccgctggccttgctgctccacgccgccaggccggcatgcgccagcagcgaggaccgctacaagggtaccggcggaggcggatctggcggcggaggtagcggtggcggaggatctgaattcgacatccagatgacacagagccctagcagcctgtctgccagcgtgggagacagagtgaccatcacatgcaaggccagcgaccacatcaacaactggctggcctggtatcagcagaagcctggacaggcccctaagctgctgatctacggcgctaccacactggaaacaggcgtgcccagcagattttctggcagcggctctggcaccgactacaccctgacaatatccagcctccagcctgaggacttcgccacctactactgtcagcagagctggaacaccccttggacattcggccagggcaccaagctggaaatcaagagactcgaggacctgaagaacgtgttcccacctgaggtggccgtgttcgagcctagcgaggccgagatcagccacacccagaaagccaccctcgtgtgcctggctaccggcttctaccccgaccatgtggaactgtcttggtgggtcaacggcaaagaggtgcacagcggcgtgtgtaccgacccccagccactgaaagaacagcccgccctgaacgacagccggtactgcctgagcagcagactgagagtgtccgccaccttctggcagaacccccggaaccacttcagatgccaggtgcagttctacggcctgagcgagaacgacgagtggacccaggacagagccaagcccgtgacccagatcgtgtctgccgaagcctggggcagagccgattgcggctttaccagcgagagctaccagcagggcgtgctgagcgccaccatcctgtacgagatcctgctgggcaaggccaccctgtacgccgtgctggtgtctgccctggtgctgatggctatggtcaagcggaaggacagccggggaagggccaagcgatctggatctggagcaacaaacttctcactactcaaacaagcaggtgacgtggaggagaatcccgggcctactagtgccaccatggactggatttggcgcatccttttccttgtcggcgctgctaccggcgcccattccttcgaacaagttcagcttcaacagcctggcgctgagctggtcaaacctggcgcttctgtgaagatgagctgcaaagccagcggctacgccttcagcagctactggatcaactggatgaagcagaaacccggccagggactcgaatggatcggccaaatctatcccggcgacggcgacaccaactacaacggcaagttcaagggcagagccacactgaccgccgatacctctagcagcacagcctacatgcagctgagcagcctgaccagcgaagatagcgccgtgtacttctgtgcccggtccatcacaacagtcgtgggctgcgctatggactattggggccagggaacaagcgtgaccgtgtctagtacgcgtatccagaaccctgatcctgccgtgtaccagctgcgggatagcaagagcagcgacaagagcgtgtgtctgttcaccgacttcgacagccagaccaacgtgtcccagagcaaggactccgacgtgtacatcaccgataagtgcgtgctggacatgcggagcatggacttcaagagcaactccgccgtggcctggtccaacaagtccgatttcgcctgcgccaacgccttcaacaacagcattatccccgaggacacattcttcccaagccccgagagcagctgcgacgtgaagctggtggaaaagagcttcgagacagacaccaacctgaacttccagaacctgagcgtgatcggcttcagaatcctgctgctgaaagtggccggctttaacctgctgatgaccctgcggctgtggtccagctaa

SEQ ID NO: 8271 - DNA, 1962 bp, synthetic construct
  source 1..1962: mol_type = other DNA
atggccttaccagtgaccgccttgctcctgccgctggccttgctgctccacgccgccaggccggcatgcgcccacagcgaggaccgctacaagggtaccggcggaggcggatctggcggcggaggtagcggtggcggaggatctgaattcgacatccagatgacacagagccctagcagcctgtctgccagcgtgggagacagagtgaccatcacatgcaaggccagcgaccacatcaacaactggctggcctggtatcagcagaagcctggacaggcccctaagctgctgatctacggcgctaccacactggaaacaggcgtgcccagcagattttctggcagcggctctggcaccgactacaccctgacaatatccagcctccagcctgaggacttcgccacctactactgtcagcagagctggaacaccccttggacattcggccagggcaccaagctggaaatcaagagactcgaggacctgaagaacgtgttcccacctgaggtggccgtgttcgagcctagcgaggccgagatcagccacacccagaaagccaccctcgtgtgcctggctaccggcttctaccccgaccatgtggaactgtcttggtgggtcaacggcaaagaggtgcacagcggcgtgtgtaccgacccccagccactgaaagaacagcccgccctgaacgacagccggtactgcctgagcagcagactgagagtgtccgccaccttctggcagaacccccggaaccacttcagatgccaggtgcagttctacggcctgagcgagaacgacgagtggacccaggacagagccaagcccgtgacccagatcgtgtctgccgaagcctggggcagagccgattgcggctttaccagcgagagctaccagcagggcgtgctgagcgccaccatcctgtacgagatcctgctgggcaaggccaccctgtacgccgtgctggtgtctgccctggtgctgatggctatggtcaagcggaaggacagccggggaagggccaagcgatctggatctggagcaacaaacttctcactactcaaacaagcaggtgacgtggaggagaatcccgggcctactagtgccaccatggactggatttggcgcatccttttccttgtcggcgctgctaccggcgcccattccttcgaacaagttcagcttcaacagcctggcgctgagctggtcaaacctggcgcttctgtgaagatgagctgcaaagccagcggctacgccttcagcagctactggatcaactggatgaagcagaaacccggccagggactcgaatggatcggccaaatctatcccggcgacggcgacaccaactacaacggcaagttcaagggcagagccacactgaccgccgatacctctagcagcacagcctacatgcagctgagcagcctgaccagcgaagatagcgccgtgtacttctgtgcccggtccatcacaacagtcgtgggctgcgctatggactattggggccagggaacaagcgtgaccgtgtctagtacgcgtatccagaaccctgatcctgccgtgtaccagctgcgggatagcaagagcagcgacaagagcgtgtgtctgttcaccgacttcgacagccagaccaacgtgtcccagagcaaggactccgacgtgtacatcaccgataagtgcgtgctggacatgcggagcatggacttcaagagcaactccgccgtggcctggtccaacaagtccgatttcgcctgcgccaacgccttcaacaacagcattatccccgaggacacattcttcccaagccccgagagcagctgcgacgtgaagctggtggaaaagagcttcgagacagacaccaacctgaacttccagaacctgagcgtgatcggcttcagaatcctgctgctgaaagtggccggctttaacctgctgatgaccctgcggctgtggtccagctaa

SEQ ID NO: 8272 - DNA, 1962 bp, synthetic construct
  source 1..1962: mol_type = other DNA
atggccttaccagtgaccgccttgctcctgccgctggccttgctgctccacgccgccaggccggcatgcgccgacagcgaggaccgctacaagggtaccggcggaggcggatctggcggcggaggtagcggtggcggaggatctgaattcgacatccagatgacacagagccctagcagcctgtctgccagcgtgggagacagagtgaccatcacatgcaaggccagcgaccacatcaacaactggctggcctggtatcagcagaagcctggacaggcccctaagctgctgatctacggcgctaccacactggaaacaggcgtgcccagcagattttctggcagcggctctggcaccgactacaccctgacaatatccagcctccagcctgaggacttcgccacctactactgtcagcagagctggaacaccccttggacattcggccagggcaccaagctggaaatcaagagactcgaggacctgaagaacgtgttcccacctgaggtggccgtgttcgagcctagcgaggccgagatcagccacacccagaaagccaccctcgtgtgcctggctaccggcttctaccccgaccatgtggaactgtcttggtgggtcaacggcaaagaggtgcacagcggcgtgtgtaccgacccccagccactgaaagaacagcccgccctgaacgacagccggtactgcctgagcagcagactgagagtgtccgccaccttctggcagaacccccggaaccacttcagatgccaggtgcagttctacggcctgagcgagaacgacgagtggacccaggacagagccaagcccgtgacccagatcgtgtctgccgaagcctggggcagagccgattgcggctttaccagcgagagctaccagcagggcgtgctgagcgccaccatcctgtacgagatcctgctgggcaaggccaccctgtacgccgtgctggtgtctgccctggtgctgatggctatggtcaagcggaaggacagccggggaagggccaagcgatctggatctggagcaacaaacttctcactactcaaacaagcaggtgacgtggaggagaatcccgggcctactagtgccaccatggactggatttggcgcatccttttccttgtcggcgctgctaccggcgcccattccttcgaacaagttcagcttcaacagcctggcgctgagctggtcaaacctggcgcttctgtgaagatgagctgcaaagccagcggctacgccttcagcagctactggatcaactggatgaagcagaaacccggccagggactcgaatggatcggccaaatctatcccggcgacggcgacaccaactacaacggcaagttcaagggcagagccacactgaccgccgatacctctagcagcacagcctacatgcagctgagcagcctgaccagcgaagatagcgccgtgtacttctgtgcccggtccatcacaacagtcgtgggctgcgctatggactattggggccagggaacaagcgtgaccgtgtctagtacgcgtatccagaaccctgatcctgccgtgtaccagctgcgggatagcaagagcagcgacaagagcgtgtgtctgttcaccgacttcgacagccagaccaacgtgtcccagagcaaggactccgacgtgtacatcaccgataagtgcgtgctggacatgcggagcatggacttcaagagcaactccgccgtggcctggtccaacaagtccgatttcgcctgcgccaacgccttcaacaacagcattatccccgaggacacattcttcccaagccccgagagcagctgcgacgtgaagctggtggaaaagagcttcgagacagacaccaacctgaacttccagaacctgagcgtgatcggcttcagaatcctgctgctgaaagtggccggctttaacctgctgatgaccctgcggctgtggtccagctaa

SEQ ID NO: 8273 - DNA, 1962 bp, synthetic construct
  source 1..1962: mol_type = other DNA
atggccttaccagtgaccgccttgctcctgccgctggccttgctgctccacgccgccaggccggcatgcttcgacagcgaggaccgctacaagggtaccggcggaggcggatctggcggcggaggtagcggtggcggaggatctgaattcgacatccagatgacacagagccctagcagcctgtctgccagcgtgggagacagagtgaccatcacatgcaaggccagcgaccacatcaacaactggctggcctggtatcagcagaagcctggacaggcccctaagctgctgatctacggcgctaccacactggaaacaggcgtgcccagcagattttctggcagcggctctggcaccgactacaccctgacaatatccagcctccagcctgaggacttcgccacctactactgtcagcagagctggaacaccccttggacattcggccagggcaccaagctggaaatcaagagactcgaggacctgaagaacgtgttcccacctgaggtggccgtgttcgagcctagcgaggccgagatcagccacacccagaaagccaccctcgtgtgcctggctaccggcttctaccccgaccatgtggaactgtcttggtgggtcaacggcaaagaggtgcacagcggcgtgtgtaccgacccccagccactgaaagaacagcccgccctgaacgacagccggtactgcctgagcagcagactgagagtgtccgccaccttctggcagaacccccggaaccacttcagatgccaggtgcagttctacggcctgagcgagaacgacgagtggacccaggacagagccaagcccgtgacccagatcgtgtctgccgaagcctggggcagagccgattgcggctttaccagcgagagctaccagcagggcgtgctgagcgccaccatcctgtacgagatcctgctgggcaaggccaccctgtacgccgtgctggtgtctgccctggtgctgatggctatggtcaagcggaaggacagccggggaagggccaagcgatctggatctggagcaacaaacttctcactactcaaacaagcaggtgacgtggaggagaatcccgggcctactagtgccaccatggactggatttggcgcatccttttccttgtcggcgctgctaccggcgcccattccttcgaacaagttcagcttcaacagcctggcgctgagctggtcaaacctggcgcttctgtgaagatgagctgcaaagccagcggctacgccttcagcagctactggatcaactggatgaagcagaaacccggccagggactcgaatggatcggccaaatctatcccggcgacggcgacaccaactacaacggcaagttcaagggcagagccacactgaccgccgatacctctagcagcacagcctacatgcagctgagcagcctgaccagcgaagatagcgccgtgtacttctgtgcccggtccatcacaacagtcgtgggctgcgctatggactattggggccagggaacaagcgtgaccgtgtctagtacgcgtatccagaaccctgatcctgccgtgtaccagctgcgggatagcaagagcagcgacaagagcgtgtgtctgttcaccgacttcgacagccagaccaacgtgtcccagagcaaggactccgacgtgtacatcaccgataagtgcgtgctggacatgcggagcatggacttcaagagcaactccgccgtggcctggtccaacaagtccgatttcgcctgcgccaacgccttcaacaacagcattatccccgaggacacattcttcccaagccccgagagcagctgcgacgtgaagctggtggaaaagagcttcgagacagacaccaacctgaacttccagaacctgagcgtgatcggcttcagaatcctgctgctgaaagtggccggctttaacctgctgatgaccctgcggctgtggtccagctaa

SEQ ID NO: 8274 - DNA, 1962 bp, synthetic construct; identical to SEQ ID NO: 8224
  source 1..1962: mol_type = other DNA

SEQ ID NO: 8275 - DNA, 1962 bp, synthetic construct
  source 1..1962: mol_type = other DNA
atggccttaccagtgaccgccttgctcctgccgctggccttgctgctccacgccgccaggccggcatgcgcccccagcgaggaccgctaccgcggtaccggcggaggcggatctggcggcggaggtagcggtggcggaggatctgaattcgacatccagatgacacagagccctagcagcctgtctgccagcgtgggagacagagtgaccatcacatgcaaggccagcgaccacatcaacaactggctggcctggtatcagcagaagcctggacaggcccctaagctgctgatctacggcgctaccacactggaaacaggcgtgcccagcagattttctggcagcggctctggcaccgactacaccctgacaatatccagcctccagcctgaggacttcgccacctactactgtcagcagagctggaacaccccttggacattcggccagggcaccaagctggaaatcaagagactcgaggacctgaagaacgtgttcccacctgaggtggccgtgttcgagcctagcgaggccgagatcagccacacccagaaagccaccctcgtgtgcctggctaccggcttctaccccgaccatgtggaactgtcttggtgggtcaacggcaaagaggtgcacagcggcgtgtgtaccgacccccagccactgaaagaacagcccgccctgaacgacagccggtactgcctgagcagcagactgagagtgtccgccaccttctggcagaacccccggaaccacttcagatgccaggtgcagttctacggcctgagcgagaacgacgagtggacccaggacagagccaagcccgtgacccagatcgtgtctgccgaagcctggggcagagccgattgcggctttaccagcgagagctaccagcagggcgtgctgagcgccaccatcctgtacgagatcctgctgggcaaggccaccctgtacgccgtgctggtgtctgccctggtgctgatggctatggtcaagcggaaggacagccggggaagggccaagcgatctggatctggagcaacaaacttctcactactcaaacaagcaggtgacgtggaggagaatcccgggcctactagtgccaccatggactggatttggcgcatccttttccttgtcggcgctgctaccggcgcccattccttcgaacaagttcagcttcaacagcctggcgctgagctggtcaaacctggcgcttctgtgaagatgagctgcaaagccagcggctacgccttcagcagctactggatcaactggatgaagcagaaacccggccagggactcgaatggatcggccaaatctatcccggcgacggcgacaccaactacaacggcaagttcaagggcagagccacactgaccgccgatacctctagcagcacagcctacatgcagctgagcagcctgaccagcgaagatagcgccgtgtacttctgtgcccggtccatcacaacagtcgtgggctgcgctatggactattggggccagggaacaagcgtgaccgtgtctagtacgcgtatccagaaccctgatcctgccgtgtaccagctgcgggatagcaagagcagcgacaagagcgtgtgtctgttcaccgacttcgacagccagaccaacgtgtcccagagcaaggactccgacgtgtacatcaccgataagtgcgtgctggacatgcggagcatggacttcaagagcaactccgccgtggcctggtccaacaagtccgatttcgcctgcgccaacgccttcaacaacagcattatccccgaggacacattcttcccaagccccgagagcagctgcgacgtgaagctggtggaaaagagcttcgagacagacaccaacctgaacttccagaacctgagcgtgatcggcttcagaatcctgctgctgaaagtggccggctttaacctgctgatgaccctgcggctgtggtccagctaa

SEQ ID NO: 8276 - DNA, 1962 bp, synthetic construct
  source 1..1962: mol_type = other DNA
atggccttaccagtgaccgccttgctcctgccgctggccttgctgctccacgccgccaggccggcatgcgccggcagcgaggaccgctaccgcggtaccggcggaggcggatctggcggcggaggtagcggtggcggaggatctgaattcgacatccagatgacacagagccctagcagcctgtctgccagcgtgggagacagagtgaccatcacatgcaaggccagcgaccacatcaacaactggctggcctggtatcagcagaagcctggacaggcccctaagctgctgatctacggcgctaccacactggaaacaggcgtgcccagcagattttctggcagcggctctggcaccgactacaccctgacaatatccagcctccagcctgaggacttcgccacctactactgtcagcagagctggaacaccccttggacattcggccagggcaccaagctggaaatcaagagactcgaggacctgaagaacgtgttcccacctgaggtggccgtgttcgagcctagcgaggccgagatcagccacacccagaaagccaccctcgtgtgcctggctaccggcttctaccccgaccatgtggaactgtcttggtgggtcaacggcaaagaggtgcacagcggcgtgtgtaccgacccccagccactgaaagaacagcccgccctgaacgacagccggtactgcctgagcagcagactgagagtgtccgccaccttctggcagaacccccggaaccacttcagatgccaggtgcagttctacggcctgagcgagaacgacgagtggacccaggacagagccaagcccgtgacccagatcgtgtctgccgaagcctggggcagagccgattgcggctttaccagcgagagctaccagcagggcgtgctgagcgccaccatcctgtacgagatcctgctgggcaaggccaccctgtacgccgtgctggtgtctgccctggtgctgatggctatggtcaagcggaaggacagccggggaagggccaagcgatctggatctggagcaacaaacttctcactactcaaacaagcaggtgacgtggaggagaatcccgggcctactagtgccaccatggactggatttggcgcatccttttccttgtcggcgctgctaccggcgcccattccttcgaacaagttcagcttcaacagcctggcgctgagctggtcaaacctggcgcttctgtgaagatgagctgcaaagccagcggctacgccttcagcagctactggatcaactggatgaagcagaaacccggccagggactcgaatggatcggccaaatctatcccggcgacggcgacaccaactacaacggcaagttcaagggcagagccacactgaccgccgatacctctagcagcacagcctacatgcagctgagcagcctgaccagcgaagatagcgccgtgtacttctgtgcccggtccatcacaacagtcgtgggctgcgctatggactattggggccagggaacaagcgtgaccgtgtctagtacgcgtatccagaaccctgatcctgccgtgtaccagctgcgggatagcaagagcagcgacaagagcgtgtgtctgttcaccgacttcgacagccagaccaacgtgtcccagagcaaggactccgacgtgtacatcaccgataagtgcgtgctggacatgcggagcatggacttcaagagcaactccgccgtggcctggtccaacaagtccgatttcgcctgcgccaacgccttcaacaacagcattatccccgaggacacattcttcccaagccccgagagcagctgcgacgtgaagctggtggaaaagagcttcgagacagacaccaacctgaacttccagaacctgagcgtgatcggcttcagaatcctgctgctgaaagtggccggctttaacctgctgatgaccctgcggctgtggtccagctaa

SEQ ID NO: 8277 - DNA, 1962 bp, synthetic construct
  source 1..1962: mol_type = other DNA
atggccttaccagtgaccgccttgctcctgccgctggccttgctgctccacgccgccaggccggcatgcgcccgcagcaaggaccgctaccgcggtaccggcggaggcggatctggcggcggaggtagcggtggcggaggatctgaattcgacatccagatgacacagagccctagcagcctgtctgccagcgtgggagacagagtgaccatcacatgcaaggccagcgaccacatcaacaactggctggcctggtatcagcagaagcctggacaggcccctaagctgctgatctacggcgctaccacactggaaacaggcgtgcccagcagattttctggcagcggctctggcaccgactacaccctgacaatatccagcctccagcctgaggacttcgccacctactactgtcagcagagctggaacaccccttggacattcggccagggcaccaagctggaaatcaagagactcgaggacctgaagaacgtgttcccacctgaggtggccgtgttcgagcctagcgaggccgagatcagccacacccagaaagccaccctcgtgtgcctggctaccggcttctaccccgaccatgtggaactgtcttggtgggtcaacggcaaagaggtgcacagcggcgtgtgtaccgacccccagccactgaaagaacagcccgccctgaacgacagccggtactgcctgagcagcagactgagagtgtccgccaccttctggcagaacccccggaaccacttcagatgccaggtgcagttctacggcctgagcgagaacgacgagtggacccaggacagagccaagcccgtgacccagatcgtgtctgccgaagcctggggcagagccgattgcggctttaccagcgagagctaccagcagggcgtgctgagcgccaccatcctgtacgagatcctgctgggcaaggccaccctgtacgccgtgctggtgtctgccctggtgctgatggctatggtcaagcggaaggacagccggggaagggccaagcgatctggatctggagcaacaaacttctcactactcaaacaagcaggtgacgtggaggagaatcccgggcctactagtgccaccatggactggatttggcgcatccttttccttgtcggcgctgctaccggcgcccattccttcgaacaagttcagcttcaacagcctggcgctgagctggtcaaacctggcgcttctgtgaagatgagctgcaaagccagcggctacgccttcagcagctactggatcaactggatgaagcagaaacccggccagggactcgaatggatcggccaaatctatcccggcgacggcgacaccaactacaacggcaagttcaagggcagagccacactgaccgccgatacctctagcagcacagcctacatgcagctgagcagcctgaccagcgaagatagcgccgtgtacttctgtgcccggtccatcacaacagtcgtgggctgcgctatggactattggggccagggaacaagcgtgaccgtgtctagtacgcgtatccagaaccctgatcctgccgtgtaccagctgcgggatagcaagagcagcgacaagagcgtgtgtctgttcaccgacttcgacagccagaccaacgtgtcccagagcaaggactccgacgtgtacatcaccgataagtgcgtgctggacatgcggagcatggacttcaagagcaactccgccgtggcctggtccaacaagtccgatttcgcctgcgccaacgccttcaacaacagcattatccccgaggacacattcttcccaagccccgagagcagctgcgacgtgaagctggtggaaaagagcttcgagacagacaccaacctgaacttccagaacctgagcgtgatcggcttcagaatcctgctgctgaaagtggccggctttaacctgctgatgaccctgcggctgtggtccagctaa

SEQ ID NO: 8278 - DNA, 1962 bp, synthetic construct
  source 1..1962: mol_type = other DNA
atggccttaccagtgaccgccttgctcctgccgctggccttgctgctccacgccgccaggccggcatgcgcccgcagccgcgaccgctaccgcggtaccggcggaggcggatctggcggcggaggtagcggtggcggaggatctgaattcgacatccagatgacacagagccctagcagcctgtctgccagcgtgggagacagagtgaccatcacatgcaaggccagcgaccacatcaacaactggctggcctggtatcagcagaagcctggacaggcccctaagctgctgatctacggcgctaccacactggaaacaggcgtgcccagcagattttctggcagcggctctggcaccgactacaccctgacaatatccagcctccagcctgaggacttcgccacctactactgtcagcagagctggaacaccccttggacattcggccagggcaccaagctggaaatcaagagactcgaggacctgaagaacgtgttcccacctgaggtggccgtgttcgagcctagcgaggccgagatcagccacacccagaaagccaccctcgtgtgcctggctaccggcttctaccccgaccatgtggaactgtcttggtgggtcaacggcaaagaggtgcacagcggcgtgtgtaccgacccccagccactgaaagaacagcccgccctgaacgacagccggtactgcctgagcagcagactgagagtgtccgccaccttctggcagaacccccggaaccacttcagatgccaggtgcagttctacggcctgagcgagaacgacgagtggacccaggacagagccaagcccgtgacccagatcgtgtctgccgaagcctggggcagagccgattgcggctttaccagcgagagctaccagcagggcgtgctgagcgccaccatcctgtacgagatcctgctgggcaaggccaccctgtacgccgtgctggtgtctgccctggtgctgatggctatggtcaagcggaaggacagccggggaagggccaagcgatctggatctggagcaacaaacttctcactactcaaacaagcaggtgacgtggaggagaatcccgggcctactagtgccaccatggactggatttggcgcatccttttccttgtcggcgctgctaccggcgcccattccttcgaacaagttcagcttcaacagcctggcgctgagctggtcaaacctggcgcttctgtgaagatgagctgcaaagccagcggctacgccttcagcagctactggatcaactggatgaagcagaaacccggccagggactcgaatggatcggccaaatctatcccggcgacggcgacaccaactacaacggcaagttcaagggcagagccacactgaccgccgatacctctagcagcacagcctacatgcagctgagcagcctgaccagcgaagatagcgccgtgtacttctgtgcccggtccatcacaacagtcgtgggctgcgctatggactattggggccagggaacaagcgtgaccgtgtctagtacgcgtatccagaaccctgatcctgccgtgtaccagctgcgggatagcaagagcagcgacaagagcgtgtgtctgttcaccgacttcgacagccagaccaacgtgtcccagagcaaggactccgacgtgtacatcaccgataagtgcgtgctggacatgcggagcatggacttcaagagcaactccgccgtggcctggtccaacaagtccgatttcgcctgcgccaacgccttcaacaacagcattatccccgaggacacattcttcccaagccccgagagcagctgcgacgtgaagctggtggaaaagagcttcgagacagacaccaacctgaacttccagaacctgagcgtgatcggcttcagaatcctgctgctgaaagtggccggctttaacctgctgatgaccctgcggctgtggtccagctaa

SEQ ID NO: 8279 - DNA, 1962 bp, synthetic construct
  source 1..1962: mol_type = other DNA
atggccttaccagtgaccgccttgctcctgccgctggccttgctgctccacgccgccaggccggcatgcgcccgcagcctggaccgctaccgcggtaccggcggaggcggatctggcggcggaggtagcggtggcggaggatctgaattcgacatccagatgacacagagccctagcagcctgtctgccagcgtgggagacagagtgaccatcacatgcaaggccagcgaccacatcaacaactggctggcctggtatcagcagaagcctggacaggcccctaagctgctgatctacggcgctaccacactggaaacaggcgtgcccagcagattttctggcagcggctctggcaccgactacaccctgacaatatccagcctccagcctgaggacttcgccacctactactgtcagcagagctggaacaccccttggacattcggccagggcaccaagctggaaatcaagagactcgaggacctgaagaacgtgttcccacctgaggtggccgtgttcgagcctagcgaggccgagatcagccacacccagaaagccaccctcgtgtgcctggctaccggcttctaccccgaccatgtggaactgtcttggtgggtcaacggcaaagaggtgcacagcggcgtgtgtaccgacccccagccactgaaagaacagcccgccctgaacgacagccggtactgcctgagcagcagactgagagtgtccgccaccttctggcagaacccccggaaccacttcagatgccaggtgcagttctacggcctgagcgagaacgacgagtggacccaggacagagccaagcccgtgacccagatcgtgtctgccgaagcctggggcagagccgattgcggctttaccagcgagagctaccagcagggcgtgctgagcgccaccatcctgtacgagatcctgctgggcaaggccaccctgtacgccgtgctggtgtctgccctggtgctgatggctatggtcaagcggaaggacagccggggaagggccaagcgatctggatctggagcaacaaacttctcactactcaaacaagcaggtgacgtggaggagaatcccgggcctactagtgccaccatggactggatttggcgcatccttttccttgtcggcgctgctaccggcgcccattccttcgaacaagttcagcttcaacagcctggcgctgagctggtcaaacctggcgcttctgtgaagatgagctgcaaagccagcggctacgccttcagcagctactggatcaactggatgaagcagaaacccggccagggactcgaatggatcggccaaatctatcccggcgacggcgacaccaactacaacggcaagttcaagggcagagccacactgaccgccgatacctctagcagcacagcctacatgcagctgagcagcctgaccagcgaagatagcgccgtgtacttctgtgcccggtccatcacaacagtcgtgggctgcgctatggactattggggccagggaacaagcgtgaccgtgtctagtacgcgtatccagaaccctgatcctgccgtgtaccagctgcgggatagcaagagcagcgacaagagcgtgtgtctgttcaccgacttcgacagccagaccaacgtgtcccagagcaaggactccgacgtgtacatcaccgataagtgcgtgctggacatgcggagcatggacttcaagagcaactccgccgtggcctggtccaacaagtccgatttcgcctgcgccaacgccttcaacaacagcattatccccgaggacacattcttcccaagccccgagagcagctgcgacgtgaagctggtggaaaagagcttcgagacagacaccaacctgaacttccagaacctgagcgtgatcggcttcagaatcctgctgctgaaagtggccggctttaacctgctgatgaccctgcggctgtggtccagctaa

SEQ ID NO: 8280 - DNA, 1962 bp, synthetic construct
  source 1..1962: mol_type = other DNA
atggccttaccagtgaccgccttgctcctgccgctggccttgctgctccacgccgccaggccggcatgcgcccgcagccccgaccgctaccgcggtaccggcggaggcggatctggcggcggaggtagcggtggcggaggatctgaattcgacatccagatgacacagagccctagcagcctgtctgccagcgtgggagacagagtgaccatcacatgcaaggccagcgaccacatcaacaactggctggcctggtatcagcagaagcctggacaggcccctaagctgctgatctacggcgctaccacactggaaacaggcgtgcccagcagattttctggcagcggctctggcaccgactacaccctgacaatatccagcctccagcctgaggacttcgccacctactactgtcagcagagctggaacaccccttggacattcggccagggcaccaagctggaaatcaagagactcgaggacctgaagaacgtgttcccacctgaggtggccgtgttcgagcctagcgaggccgagatcagccacacccagaaagccaccctcgtgtgcctggctaccggcttctaccccgaccatgtggaactgtcttggtgggtcaacggcaaagaggtgcacagcggcgtgtgtaccgacccccagccactgaaagaacagcccgccctgaacgacagccggtactgcctgagcagcagactgagagtgtccgccaccttctggcagaacccccggaaccacttcagatgccaggtgcagttctacggcctgagcgagaacgacgagtggacccaggacagagccaagcccgtgacccagatcgtgtctgccgaagcctggggcagagccgattgcggctttaccagcgagagctaccagcagggcgtgctgagcgccaccatcctgtacgagatcctgctgggcaaggccaccctgtacgccgtgctggtgtctgccctggtgctgatggctatggtcaagcggaaggacagccggggaagggccaagcgatctggatctggagcaacaaacttctcactactcaaacaagcaggtgacgtggaggagaatcccgggcctactagtgccaccatggactggatttggcgcatccttttccttgtcggcgctgctaccggcgcccattccttcgaacaagttcagcttcaacagcctggcgctgagctggtcaaacctggcgcttctgtgaagatgagctgcaaagccagcggctacgccttcagcagctactggatcaactggatgaagcagaaacccggccagggactcgaatggatcggccaaatctatcccggcgacggcgacaccaactacaacggcaagttcaagggcagagccacactgaccgccgatacctctagcagcacagcctacatgcagctgagcagcctgaccagcgaagatagcgccgtgtacttctgtgcccggtccatcacaacagtcgtgggctgcgctatggactattggggccagggaacaagcgtgaccgtgtctagtacgcgtatccagaaccctgatcctgccgtgtaccagctgcgggatagcaagagcagcgacaagagcgtgtgtctgttcaccgacttcgacagccagaccaacgtgtcccagagcaaggactccgacgtgtacatcaccgataagtgcgtgctggacatgcggagcatggacttcaagagcaactccgccgtggcctggtccaacaagtccgatttcgcctgcgccaacgccttcaacaacagcattatccccgaggacacattcttcccaagccccgagagcagctgcgacgtgaagctggtggaaaagagcttcgagacagacaccaacctgaacttccagaacctgagcgtgatcggcttcagaatcctgctgctgaaagtggccggctttaacctgctgatgaccctgcggctgtggtccagctaa

SEQ ID NO: 8281 - DNA, 1962 bp, synthetic construct
  source 1..1962: mol_type = other DNA
atggccttaccagtgaccgccttgctcctgccgctggccttgctgctccacgccgccaggccggcatgcgcccgccgcgaggaccgctaccgcggtaccggcggaggcggatctggcggcggaggtagcggtggcggaggatctgaattcgacatccagatgacacagagccctagcagcctgtctgccagcgtgggagacagagtgaccatcacatgcaaggccagcgaccacatcaacaactggctggcctggtatcagcagaagcctggacaggcccctaagctgctgatctacggcgctaccacactggaaacaggcgtgcccagcagattttctggcagcggctctggcaccgactacaccctgacaatatccagcctccagcctgaggacttcgccacctactactgtcagcagagctggaacaccccttggacattcggccagggcaccaagctggaaatcaagagactcgaggacctgaagaacgtgttcccacctgaggtggccgtgttcgagcctagcgaggccgagatcagccacacccagaaagccaccctcgtgtgcctggctaccggcttctaccccgaccatgtggaactgtcttggtgggtcaacggcaaagaggtgcacagcggcgtgtgtaccgacccccagccactgaaagaacagcccgccctgaacgacagccggtactgcctgagcagcagactgagagtgtccgccaccttctggcagaacccccggaaccacttcagatgccaggtgcagttctacggcctgagcgagaacgacgagtggacccaggacagagccaagcccgtgacccagatcgtgtctgccgaagcctggggcagagccgattgcggctttaccagcgagagctaccagcagggcgtgctgagcgccaccatcctgtacgagatcctgctgggcaaggccaccctgtacgccgtgctggtgtctgccctggtgctgatggctatggtcaagcggaaggacagccggggaagggccaagcgatctggatctggagcaacaaacttctcactactcaaacaagcaggtgacgtggaggagaatcccgggcctactagtgccaccatggactggatttggcgcatccttttccttgtcggcgctgctaccggcgcccattccttcgaacaagttcagcttcaacagcctggcgctgagctggtcaaacctggcgcttctgtgaagatgagctgcaaagccagcggctacgccttcagcagctactggatcaactggatgaagcagaaacccggccagggactcgaatggatcggccaaatctatcccggcgacggcgacaccaactacaacggcaagttcaagggcagagccacactgaccgccgatacctctagcagcacagcctacatgcagctgagcagcctgaccagcgaagatagcgccgtgtacttctgtgcccggtccatcacaacagtcgtgggctgcgctatggactattggggccagggaacaagcgtgaccgtgtctagtacgcgtatccagaaccctgatcctgccgtgtaccagctgcgggatagcaagagcagcgacaagagcgtgtgtctgttcaccgacttcgacagccagaccaacgtgtcccagagcaaggactccgacgtgtacatcaccgataagtgcgtgctggacatgcggagcatggacttcaagagcaactccgccgtggcctggtccaacaagtccgatttcgcctgcgccaacgccttcaacaacagcattatccccgaggacacattcttcccaagccccgagagcagctgcgacgtgaagctggtggaaaagagcttcgagacagacaccaacctgaacttccagaacctgagcgtgatcggcttcagaatcctgctgctgaaagtggccggctttaacctgctgatgaccctgcggctgtggtccagctaa

SEQ ID NO: 8282 - DNA, 1962 bp, synthetic construct
  source 1..1962: mol_type = other DNA
atggccttaccagtgaccgccttgctcctgccgctggccttgctgctccacgccgccaggccggcatgcgcccgccaggaggaccgctaccgcggtaccggcggaggcggatctggcggcggaggtagcggtggcggaggatctgaattcgacatccagatgacacagagccctagcagcctgtctgccagcgtgggagacagagtgaccatcacatgcaaggccagcgaccacatcaacaactggctggcctggtatcagcagaagcctggacaggcccctaagctgctgatctacggcgctaccacactggaaacaggcgtgcccagcagattttctggcagcggctctggcaccgactacaccctgacaatatccagcctccagcctgaggacttcgccacctactactgtcagcagagctggaacaccccttggacattcggccagggcaccaagctggaaatcaagagactcgaggacctgaagaacgtgttcccacctgaggtggccgtgttcgagcctagcgaggccgagatcagccacacccagaaagccaccctcgtgtgcctggctaccggcttctaccccgaccatgtggaactgtcttggtgggtcaacggcaaagaggtgcacagcggcgtgtgtaccgacccccagccactgaaagaacagcccgccctgaacgacagccggtactgcctgagcagcagactgagagtgtccgccaccttctggcagaacccccggaaccacttcagatgccaggtgcagttctacggcctgagcgagaacgacgagtggacccaggacagagccaagcccgtgacccagatcgtgtctgccgaagcctggggcagagccgattgcggctttaccagcgagagctaccagcagggcgtgctgagcgccaccatcctgtacgagatcctgctgggcaaggccaccctgtacgccgtgctggtgtctgccctggtgctgatggctatggtcaagcggaaggacagccggggaagggccaagcgatctggatctggagcaacaaacttctcactactcaaacaagcaggtgacgtggaggagaatcccgggcctactagtgccaccatggactggatttggcgcatccttttccttgtcggcgctgctaccggcgcccattccttcgaacaagttcagcttcaacagcctggcgctgagctggtcaaacctggcgcttctgtgaagatgagctgcaaagccagcggctacgccttcagcagctactggatcaactggatgaagcagaaacccggccagggactcgaatggatcggccaaatctatcccggcgacggcgacaccaactacaacggcaagttcaagggcagagccacactgaccgccgatacctctagcagcacagcctacatgcagctgagcagcctgaccagcgaagatagcgccgtgtacttctgtgcccggtccatcacaacagtcgtgggctgcgctatggactattggggccagggaacaagcgtgaccgtgtctagtacgcgtatccagaaccctgatcctgccgtgtaccagctgcgggatagcaagagcagcgacaagagcgtgtgtctgttcaccgacttcgacagccagaccaacgtgtcccagagcaaggactccgacgtgtacatcaccgataagtgcgtgctggacatgcggagcatggacttcaagagcaactccgccgtggcctggtccaacaagtccgatttcgcctgcgccaacgccttcaacaacagcattatccccgaggacacattcttcccaagccccgagagcagctgcgacgtgaagctggtggaaaagagcttcgagacagacaccaacctgaacttccagaacctgagcgtgatcggcttcagaatcctgctgctgaaagtggccggctttaacctgctgatgaccctgcggctgtggtccagctaa

SEQ ID NO: 8283 - DNA, 1956 bp, synthetic construct
  source 1..1956: mol_type = other DNA
atggccttaccagtgaccgccttgctcctgccgctggccttgctgctccacgccgccaggccggcatgccgcagcgaggaccgctacggtaccggcggaggcggatctggcggcggaggtagcggtggcggaggatctgaattcgacatccagatgacacagagccctagcagcctgtctgccagcgtgggagacagagtgaccatcacatgcaaggccagcgaccacatcaacaactggctggcctggtatcagcagaagcctggacaggcccctaagctgctgatctacggcgctaccacactggaaacaggcgtgcccagcagattttctggcagcggctctggcaccgactacaccctgacaatatccagcctccagcctgaggacttcgccacctactactgtcagcagagctggaacaccccttggacattcggccagggcaccaagctggaaatcaagagactcgaggacctgaagaacgtgttcccacctgaggtggccgtgttcgagcctagcgaggccgagatcagccacacccagaaagccaccctcgtgtgcctggctaccggcttctaccccgaccatgtggaactgtcttggtgggtcaacggcaaagaggtgcacagcggcgtgtgtaccgacccccagccactgaaagaacagcccgccctgaacgacagccggtactgcctgagcagcagactgagagtgtccgccaccttctggcagaacccccggaaccacttcagatgccaggtgcagttctacggcctgagcgagaacgacgagtggacccaggacagagccaagcccgtgacccagatcgtgtctgccgaagcctggggcagagccgattgcggctttaccagcgagagctaccagcagggcgtgctgagcgccaccatcctgtacgagatcctgctgggcaaggccaccctgtacgccgtgctggtgtctgccctggtgctgatggctatggtcaagcggaaggacagccggggaagggccaagcgatctggatctggagcaacaaacttctcactactcaaacaagcaggtgacgtggaggagaatcccgggcctactagtgccaccatggactggatttggcgcatccttttccttgtcggcgctgctaccggcgcccattccttcgaacaagttcagcttcaacagcctggcgctgagctggtcaaacctggcgcttctgtgaagatgagctgcaaagccagcggctacgccttcagcagctactggatcaactggatgaagcagaaacccggccagggactcgaatggatcggccaaatctatcccggcgacggcgacaccaactacaacggcaagttcaagggcagagccacactgaccgccgatacctctagcagcacagcctacatgcagctgagcagcctgaccagcgaagatagcgccgtgtacttctgtgcccggtccatcacaacagtcgtgggctgcgctatggactattggggccagggaacaagcgtgaccgtgtctagtacgcgtatccagaaccctgatcctgccgtgtaccagctgcgggatagcaagagcagcgacaagagcgtgtgtctgttcaccgacttcgacagccagaccaacgtgtcccagagcaaggactccgacgtgtacatcaccgataagtgcgtgctggacatgcggagcatggacttcaagagcaactccgccgtggcctggtccaacaagtccgatttcgcctgcgccaacgccttcaacaacagcattatccccgaggacacattcttcccaagccccgagagcagctgcgacgtgaagctggtggaaaagagcttcgagacagacaccaacctgaacttccagaacctgagcgtgatcggcttcagaatcctgctgctgaaagtggccggctttaacctgctgatgaccctgcggctgtggtccagctaa

SEQ ID NO: 8284 - DNA, 1956 bp, synthetic construct
  source 1..1956: mol_type = other DNA
atggccttaccagtgaccgccttgctcctgccgctggccttgctgctccacgccgccaggccggcatgccgcagcgaggaccgcttcggtaccggcggaggcggatctggcggcggaggtagcggtggcggaggatctgaattcgacatccagatgacacagagccctagcagcctgtctgccagcgtgggagacagagtgaccatcacatgcaaggccagcgaccacatcaacaactggctggcctggtatcagcagaagcctggacaggcccctaagctgctgatctacggcgctaccacactggaaacaggcgtgcccagcagattttctggcagcggctctggcaccgactacaccctgacaatatccagcctccagcctgaggacttcgccacctactactgtcagcagagctggaacaccccttggacattcggccagggcaccaagctggaaatcaagagactcgaggacctgaagaacgtgttcccacctgaggtggccgtgttcgagcctagcgaggccgagatcagccacacccagaaagccaccctcgtgtgcctggctaccggcttctaccccgaccatgtggaactgtcttggtgggtcaacggcaaagaggtgcacagcggcgtgtgtaccgacccccagccactgaaagaacagcccgccctgaacgacagccggtactgcctgagcagcagactgagagtgtccgccaccttctggcagaacccccggaaccacttcagatgccaggtgcagttctacggcctgagcgagaacgacgagtggacccaggacagagccaagcccgtgacccagatcgtgtctgccgaagcctggggcagagccgattgcggctttaccagcgagagctaccagcagggcgtgctgagcgccaccatcctgtacgagatcctgctgggcaaggccaccctgtacgccgtgctggtgtctgccctggtgctgatggctatggtcaagcggaaggacagccggggaagggccaagcgatctggatctggagcaacaaacttctcactactcaaacaagcaggtgacgtggaggagaatcccgggcctactagtgccaccatggactggatttggcgcatccttttccttgtcggcgctgctaccggcgcccattccttcgaacaagttcagcttcaacagcctggcgctgagctggtcaaacctggcgcttctgtgaagatgagctgcaaagccagcggctacgccttcagcagctactggatcaactggatgaagcagaaacccggccagggactcgaatggatcggccaaatctatcccggcgacggcgacaccaactacaacggcaagttcaagggcagagccacactgaccgccgatacctctagcagcacagcctacatgcagctgagcagcctgaccagcgaagatagcgccgtgtacttctgtgcccggtccatcacaacagtcgtgggctgcgctatggactattggggccagggaacaagcgtgaccgtgtctagtacgcgtatccagaaccctgatcctgccgtgtaccagctgcgggatagcaagagcagcgacaagagcgtgtgtctgttcaccgacttcgacagccagaccaacgtgtcccagagcaaggactccgacgtgtacatcaccgataagtgcgtgctggacatgcggagcatggacttcaagagcaactccgccgtggcctggtccaacaagtccgatttcgcctgcgccaacgccttcaacaacagcattatccccgaggacacattcttcccaagccccgagagcagctgcgacgtgaagctggtggaaaagagcttcgagacagacaccaacctgaacttccagaacctgagcgtgatcggcttcagaatcctgctgctgaaagtggccggctttaacctgctgatgaccctgcggctgtggtccagctaa

SEQ ID NO: 8285 - DNA, 1956 bp, synthetic construct
  source 1..1956: mol_type = other DNA
atggccttaccagtgaccgccttgctcctgccgctggccttgctgctccacgccgccaggccggcatgccgcagcgaggaccgccacggtaccggcggaggcggatctggcggcggaggtagcggtggcggaggatctgaattcgacatccagatgacacagagccctagcagcctgtctgccagcgtgggagacagagtgaccatcacatgcaaggccagcgaccacatcaacaactggctggcctggtatcagcagaagcctggacaggcccctaagctgctgatctacggcgctaccacactggaaacaggcgtgcccagcagattttctggcagcggctctggcaccgactacaccctgacaatatccagcctccagcctgaggacttcgccacctactactgtcagcagagctggaacaccccttggacattcggccagggcaccaagctggaaatcaagagactcgaggacctgaagaacgtgttcccacctgaggtggccgtgttcgagcctagcgaggccgagatcagccacacccagaaagccaccctcgtgtgcctggctaccggcttctaccccgaccatgtggaactgtcttggtgggtcaacggcaaagaggtgcacagcggcgtgtgtaccgacccccagccactgaaagaacagcccgccctgaacgacagccggtactgcctgagcagcagactgagagtgtccgccaccttctggcagaacccccggaaccacttcagatgccaggtgcagttctacggcctgagcgagaacgacgagtggacccaggacagagccaagcccgtgacccagatcgtgtctgccgaagcctggggcagagccgattgcggctttaccagcgagagctaccagcagggcgtgctgagcgccaccatcctgtacgagatcctgctgggcaaggccaccctgtacgccgtgctggtgtctgccctggtgctgatggctatggtcaagcggaaggacagccggggaagggccaagcgatctggatctggagcaacaaacttctcactactcaaacaagcaggtgacgtggaggagaatcccgggcctactagtgccaccatggactggatttggcgcatccttttccttgtcggcgctgctaccggcgcccattccttcgaacaagttcagcttcaacagcctggcgctgagctggtcaaacctggcgcttctgtgaagatgagctgcaaagccagcggctacgccttcagcagctactggatcaactggatgaagcagaaacccggccagggactcgaatggatcggccaaatctatcccggcgacggcgacaccaactacaacggcaagttcaagggcagagccacactgaccgccgatacctctagcagcacagcctacatgcagctgagcagcctgaccagcgaagatagcgccgtgtacttctgtgcccggtccatcacaacagtcgtgggctgcgctatggactattggggccagggaacaagcgtgaccgtgtctagtacgcgtatccagaaccctgatcctgccgtgtaccagctgcgggatagcaagagcagcgacaagagcgtgtgtctgttcaccgacttcgacagccagaccaacgtgtcccagagcaaggactccgacgtgtacatcaccgataagtgcgtgctggacatgcggagcatggacttcaagagcaactccgccgtggcctggtccaacaagtccgatttcgcctgcgccaacgccttcaacaacagcattatccccgaggacacattcttcccaagccccgagagcagctgcgacgtgaagctggtggaaaagagcttcgagacagacaccaacctgaacttccagaacctgagcgtgatcggcttcagaatcctgctgctgaaagtggccggctttaacctgctgatgaccctgcggctgtggtccagctaa

SEQ ID NO: 8286 - DNA, 1956 bp, synthetic construct; identical to SEQ ID NO: 8051
  source 1..1956: mol_type = other DNA

SEQ ID NO: 8287 - DNA, 1956 bp, synthetic construct; identical to SEQ ID NO: 8054
  source 1..1956: mol_type = other DNA

SEQ ID NO: 8288 - DNA, 1956 bp, synthetic construct; identical to SEQ ID NO: 8055
  source 1..1956: mol_type = other DNA

SEQ ID NO: 8289 - DNA, 1956 bp, synthetic construct
  source 1..1956: mol_type = other DNA
atggccttaccagtgaccgccttgctcctgccgctggccttgctgctccacgccgccaggccggcatgccgcagcgagtggcgctacggtaccggcggaggcggatctggcggcggaggtagcggtggcggaggatctgaattcgacatccagatgacacagagccctagcagcctgtctgccagcgtgggagacagagtgaccatcacatgcaaggccagcgaccacatcaacaactggctggcctggtatcagcagaagcctggacaggcccctaagctgctgatctacggcgctaccacactggaaacaggcgtgcccagcagattttctggcagcggctctggcaccgactacaccctgacaatatccagcctccagcctgaggacttcgccacctactactgtcagcagagctggaacaccccttggacattcggccagggcaccaagctggaaatcaagagactcgaggacctgaagaacgtgttcccacctgaggtggccgtgttcgagcctagcgaggccgagatcagccacacccagaaagccaccctcgtgtgcctggctaccggcttctaccccgaccatgtggaactgtcttggtgggtcaacggcaaagaggtgcacagcggcgtgtgtaccgacccccagccactgaaagaacagcccgccctgaacgacagccggtactgcctgagcagcagactgagagtgtccgccaccttctggcagaacccccggaaccacttcagatgccaggtgcagttctacggcctgagcgagaacgacgagtggacccaggacagagccaagcccgtgacccagatcgtgtctgccgaagcctggggcagagccgattgcggctttaccagcgagagctaccagcagggcgtgctgagcgccaccatcctgtacgagatcctgctgggcaaggccaccctgtacgccgtgctggtgtctgccctggtgctgatggctatggtcaagcggaaggacagccggggaagggccaagcgatctggatctggagcaacaaacttctcactactcaaacaagcaggtgacgtggaggagaatcccgggcctactagtgccaccatggactggatttggcgcatccttttccttgtcggcgctgctaccggcgcccattccttcgaacaagttcagcttcaacagcctggcgctgagctggtcaaacctggcgcttctgtgaagatgagctgcaaagccagcggctacgccttcagcagctactggatcaactggatgaagcagaaacccggccagggactcgaatggatcggccaaatctatcccggcgacggcgacaccaactacaacggcaagttcaagggcagagccacactgaccgccgatacctctagcagcacagcctacatgcagctgagcagcctgaccagcgaagatagcgccgtgtacttctgtgcccggtccatcacaacagtcgtgggctgcgctatggactattggggccagggaacaagcgtgaccgtgtctagtacgcgtatccagaaccctgatcctgccgtgtaccagctgcgggatagcaagagcagcgacaagagcgtgtgtctgttcaccgacttcgacagccagaccaacgtgtcccagagcaaggactccgacgtgtacatcaccgataagtgcgtgctggacatgcggagcatggacttcaagagcaactccgccgtggcctggtccaacaagtccgatttcgcctgcgccaacgccttcaacaacagcattatccccgaggacacattcttcccaagccccgagagcagctgcgacgtgaagctggtggaaaagagcttcgagacagacaccaacctgaacttccagaacctgagcgtgatcggcttcagaatcctgctgctgaaagtggccggctttaacctgctgatgaccctgcggctgtggtccagctaa

SEQ ID NO: 8290 - DNA, 1956 bp, synthetic construct
  source 1..1956: mol_type = other DNA
atggccttaccagtgaccgccttgctcctgccgctggccttgctgctccacgccgccaggccggcatgccgcagcgagtaccgctacggtaccggcggaggcggatctggcggcggaggtagcggtggcggaggatctgaattcgacatccagatgacacagagccctagcagcctgtctgccagcgtgggagacagagtgaccatcacatgcaaggccagcgaccacatcaacaactggctggcctggtatcagcagaagcctggacaggcccctaagctgctgatctacggcgctaccacactggaaacaggcgtgcccagcagattttctggcagcggctctggcaccgactacaccctgacaatatccagcctccagcctgaggacttcgccacctactactgtcagcagagctggaacaccccttggacattcggccagggcaccaagctggaaatcaagagactcgaggacctgaagaacgtgttcccacctgaggtggccgtgttcgagcctagcgaggccgagatcagccacacccagaaagccaccctcgtgtgcctggctaccggcttctaccccgaccatgtggaactgtcttggtgggtcaacggcaaagaggtgcacagcggcgtgtgtaccgacccccagccactgaaagaacagcccgccctgaacgacagccggtactgcctgagcagcagactgagagtgtccgccaccttctggcagaacccccggaaccacttcagatgccaggtgcagttctacggcctgagcgagaacgacgagtggacccaggacagagccaagcccgtgacccagatcgtgtctgccgaagcctggggcagagccgattgcggctttaccagcgagagctaccagcagggcgtgctgagcgccaccatcctgtacgagatcctgctgggcaaggccaccctgtacgccgtgctggtgtctgccctggtgctgatggctatggtcaagcggaaggacagccggggaagggccaagcgatctggatctggagcaacaaacttctcactactcaaacaagcaggtgacgtggaggagaatcccgggcctactagtgccaccatggactggatttggcgcatccttttccttgtcggcgctgctaccggcgcccattccttcgaacaagttcagcttcaacagcctggcgctgagctggtcaaacctggcgcttctgtgaagatgagctgcaaagccagcggctacgccttcagcagctactggatcaactggatgaagcagaaacccggccagggactcgaatggatcggccaaatctatcccggcgacggcgacaccaactacaacggcaagttcaagggcagagccacactgaccgccgatacctctagcagcacagcctacatgcagctgagcagcctgaccagcgaagatagcgccgtgtacttctgtgcccggtccatcacaacagtcgtgggctgcgctatggactattggggccagggaacaagcgtgaccgtgtctagtacgcgtatccagaaccctgatcctgccgtgtaccagctgcgggatagcaagagcagcgacaagagcgtgtgtctgttcaccgacttcgacagccagaccaacgtgtcccagagcaaggactccgacgtgtacatcaccgataagtgcgtgctggacatgcggagcatggacttcaagagcaactccgccgtggcctggtccaacaagtccgatttcgcctgcgccaacgccttcaacaacagcattatccccgaggacacattcttcccaagccccgagagcagctgcgacgtgaagctggtggaaaagagcttcgagacagacaccaacctgaacttccagaacctgagcgtgatcggcttcagaatcctgctgctgaaagtggccggctttaacctgctgatgaccctgcggctgtggtccagctaa

SEQ ID NO: 8291 - DNA, 1956 bp, synthetic construct
  source 1..1956: mol_type = other DNA
atggccttaccagtgaccgccttgctcctgccgctggccttgctgctccacgccgccaggccggcatgccgcagcgagcgccgctacggtaccggcggaggcggatctggcggcggaggtagcggtggcggaggatctgaattcgacatccagatgacacagagccctagcagcctgtctgccagcgtgggagacagagtgaccatcacatgcaaggccagcgaccacatcaacaactggctggcctggtatcagcagaagcctggacaggcccctaagctgctgatctacggcgctaccacactggaaacaggcgtgcccagcagattttctggcagcggctctggcaccgactacaccctgacaatatccagcctccagcctgaggacttcgccacctactactgtcagcagagctggaacaccccttggacattcggccagggcaccaagctggaaatcaagagactcgaggacctgaagaacgtgttcccacctgaggtggccgtgttcgagcctagcgaggccgagatcagccacacccagaaagccaccctcgtgtgcctggctaccggcttctaccccgaccatgtggaactgtcttggtgggtcaacggcaaagaggtgcacagcggcgtgtgtaccgacccccagccactgaaagaacagcccgccctgaacgacagccggtactgcctgagcagcagactgagagtgtccgccaccttctggcagaacccccggaaccacttcagatgccaggtgcagttctacggcctgagcgagaacgacgagtggacccaggacagagccaagcccgtgacccagatcgtgtctgccgaagcctggggcagagccgattgcggctttaccagcgagagctaccagcagggcgtgctgagcgccaccatcctgtacgagatcctgctgggcaaggccaccctgtacgccgtgctggtgtctgccctggtgctgatggctatggtcaagcggaaggacagccggggaagggccaagcgatctggatctggagcaacaaacttctcactactcaaacaagcaggtgacgtggaggagaatcccgggcctactagtgccaccatggactggatttggcgcatccttttccttgtcggcgctgctaccggcgcccattccttcgaacaagttcagcttcaacagcctggcgctgagctggtcaaacctggcgcttctgtgaagatgagctgcaaagccagcggctacgccttcagcagctactggatcaactggatgaagcagaaacccggccagggactcgaatggatcggccaaatctatcccggcgacggcgacaccaactacaacggcaagttcaagggcagagccacactgaccgccgatacctctagcagcacagcctacatgcagctgagcagcctgaccagcgaagatagcgccgtgtacttctgtgcccggtccatcacaacagtcgtgggctgcgctatggactattggggccagggaacaagcgtgaccgtgtctagtacgcgtatccagaaccctgatcctgccgtgtaccagctgcgggatagcaagagcagcgacaagagcgtgtgtctgttcaccgacttcgacagccagaccaacgtgtcccagagcaaggactccgacgtgtacatcaccgataagtgcgtgctggacatgcggagcatggacttcaagagcaactccgccgtggcctggtccaacaagtccgatttcgcctgcgccaacgccttcaacaacagcattatccccgaggacacattcttcccaagccccgagagcagctgcgacgtgaagctggtggaaaagagcttcgagacagacaccaacctgaacttccagaacctgagcgtgatcggcttcagaatcctgctgctgaaagtggccggctttaacctgctgatgaccctgcggctgtggtccagctaa

SEQ ID NO: 8292 - DNA, 1956 bp, synthetic construct
  source 1..1956: mol_type = other DNA
atggccttaccagtgaccgccttgctcctgccgctggccttgctgctccacgccgccaggccggcatgccgcagcgaggtgcgctacggtaccggcggaggcggatctggcggcggaggtagcggtggcggaggatctgaattcgacatccagatgacacagagccctagcagcctgtctgccagcgtgggagacagagtgaccatcacatgcaaggccagcgaccacatcaacaactggctggcctggtatcagcagaagcctggacaggcccctaagctgctgatctacggcgctaccacactggaaacaggcgtgcccagcagattttctggcagcggctctggcaccgactacaccctgacaatatccagcctccagcctgaggacttcgccacctactactgtcagcagagctggaacaccccttggacattcggccagggcaccaagctggaaatcaagagactcgaggacctgaagaacgtgttcccacctgaggtggccgtgttcgagcctagcgaggccgagatcagccacacccagaaagccaccctcgtgtgcctggctaccggcttctaccccgaccatgtggaactgtcttggtgggtcaacggcaaagaggtgcacagcggcgtgtgtaccgacccccagccactgaaagaacagcccgccctgaacgacagccggtactgcctgagcagcagactgagagtgtccgccaccttctggcagaacccccggaaccacttcagatgccaggtgcagttctacggcctgagcgagaacgacgagtggacccaggacagagccaagcccgtgacccagatcgtgtctgccgaagcctggggcagagccgattgcggctttaccagcgagagctaccagcagggcgtgctgagcgccaccatcctgtacgagatcctgctgggcaaggccaccctgtacgccgtgctggtgtctgccctggtgctgatggctatggtcaagcggaaggacagccggggaagggccaagcgatctggatctggagcaacaaacttctcactactcaaacaagcaggtgacgtggaggagaatcccgggcctactagtgccaccatggactggatttggcgcatccttttccttgtcggcgctgctaccggcgcccattccttcgaacaagttcagcttcaacagcctggcgctgagctggtcaaacctggcgcttctgtgaagatgagctgcaaagccagcggctacgccttcagcagctactggatcaactggatgaagcagaaacccggccagggactcgaatggatcggccaaatctatcccggcgacggcgacaccaactacaacggcaagttcaagggcagagccacactgaccgccgatacctctagcagcacagcctacatgcagctgagcagcctgaccagcgaagatagcgccgtgtacttctgtgcccggtccatcacaacagtcgtgggctgcgctatggactattggggccagggaacaagcgtgaccgtgtctagtacgcgtatccagaaccctgatcctgccgtgtaccagctgcgggatagcaagagcagcgacaagagcgtgtgtctgttcaccgacttcgacagccagaccaacgtgtcccagagcaaggactccgacgtgtacatcaccgataagtgcgtgctggacatgcggagcatggacttcaagagcaactccgccgtggcctggtccaacaagtccgatttcgcctgcgccaacgccttcaacaacagcattatccccgaggacacattcttcccaagccccgagagcagctgcgacgtgaagctggtggaaaagagcttcgagacagacaccaacctgaacttccagaacctgagcgtgatcggcttcagaatcctgctgctgaaagtggccggctttaacctgctgatgaccctgcggctgtggtccagctaa

SEQ ID NO: 8293 - DNA, 1956 bp, synthetic construct
  source 1..1956: mol_type = other DNA
atggccttaccagtgaccgccttgctcctgccgctggccttgctgctccacgccgccaggccggcatgccgcatcgaggaccgctacggtaccggcggaggcggatctggcggcggaggtagcggtggcggaggatctgaattcgacatccagatgacacagagccctagcagcctgtctgccagcgtgggagacagagtgaccatcacatgcaaggccagcgaccacatcaacaactggctggcctggtatcagcagaagcctggacaggcccctaagctgctgatctacggcgctaccacactggaaacaggcgtgcccagcagattttctggcagcggctctggcaccgactacaccctgacaatatccagcctccagcctgaggacttcgccacctactactgtcagcagagctggaacaccccttggacattcggccagggcaccaagctggaaatcaagagactcgaggacctgaagaacgtgttcccacctgaggtggccgtgttcgagcctagcgaggccgagatcagccacacccagaaagccaccctcgtgtgcctggctaccggcttctaccccgaccatgtggaactgtcttggtgggtcaacggcaaagaggtgcacagcggcgtgtgtaccgacccccagccactgaaagaacagcccgccctgaacgacagccggtactgcctgagcagcagactgagagtgtccgccaccttctggcagaacccccggaaccacttcagatgccaggtgcagttctacggcctgagcgagaacgacgagtggacccaggacagagccaagcccgtgacccagatcgtgtctgccgaagcctggggcagagccgattgcggctttaccagcgagagctaccagcagggcgtgctgagcgccaccatcctgtacgagatcctgctgggcaaggccaccctgtacgccgtgctggtgtctgccctggtgctgatggctatggtcaagcggaaggacagccggggaagggccaagcgatctggatctggagcaacaaacttctcactactcaaacaagcaggtgacgtggaggagaatcccgggcctactagtgccaccatggactggatttggcgcatccttttccttgtcggcgctgctaccggcgcccattccttcgaacaagttcagcttcaacagcctggcgctgagctggtcaaacctggcgcttctgtgaagatgagctgcaaagccagcggctacgccttcagcagctactggatcaactggatgaagcagaaacccggccagggactcgaatggatcggccaaatctatcccggcgacggcgacaccaactacaacggcaagttcaagggcagagccacactgaccgccgatacctctagcagcacagcctacatgcagctgagcagcctgaccagcgaagatagcgccgtgtacttctgtgcccggtccatcacaacagtcgtgggctgcgctatggactattggggccagggaacaagcgtgaccgtgtctagtacgcgtatccagaaccctgatcctgccgtgtaccagctgcgggatagcaagagcagcgacaagagcgtgtgtctgttcaccgacttcgacagccagaccaacgtgtcccagagcaaggactccgacgtgtacatcaccgataagtgcgtgctggacatgcggagcatggacttcaagagcaactccgccgtggcctggtccaacaagtccgatttcgcctgcgccaacgccttcaacaacagcattatccccgaggacacattcttcccaagccccgagagcagctgcgacgtgaagctggtggaaaagagcttcgagacagacaccaacctgaacttccagaacctgagcgtgatcggcttcagaatcctgctgctgaaagtggccggctttaacctgctgatgaccctgcggctgtggtccagctaa

SEQ ID NO: 8294 - DNA, 1956 bp, synthetic construct
  source 1..1956: mol_type = other DNA
atggccttaccagtgaccgccttgctcctgccgctggccttgctgctccacgccgccaggccggcatgccgcctggaggaccgctacggtaccggcggaggcggatctggcggcggaggtagcggtggcggaggatctgaattcgacatccagatgacacagagccctagcagcctgtctgccagcgtgggagacagagtgaccatcacatgcaaggccagcgaccacatcaacaactggctggcctggtatcagcagaagcctggacaggcccctaagctgctgatctacggcgctaccacactggaaacaggcgtgcccagcagattttctggcagcggctctggcaccgactacaccctgacaatatccagcctccagcctgaggacttcgccacctactactgtcagcagagctggaacaccccttggacattcggccagggcaccaagctggaaatcaagagactcgaggacctgaagaacgtgttcccacctgaggtggccgtgttcgagcctagcgaggccgagatcagccacacccagaaagccaccctcgtgtgcctggctaccggcttctaccccgaccatgtggaactgtcttggtgggtcaacggcaaagaggtgcacagcggcgtgtgtaccgacccccagccactgaaagaacagcccgccctgaacgacagccggtactgcctgagcagcagactgagagtgtccgccaccttctggcagaacccccggaaccacttcagatgccaggtgcagttctacggcctgagcgagaacgacgagtggacccaggacagagccaagcccgtgacccagatcgtgtctgccgaagcctggggcagagccgattgcggctttaccagcgagagctaccagcagggcgtgctgagcgccaccatcctgtacgagatcctgctgggcaaggccaccctgtacgccgtgctggtgtctgccctggtgctgatggctatggtcaagcggaaggacagccggggaagggccaagcgatctggatctggagcaacaaacttctcactactcaaacaagcaggtgacgtggaggagaatcccgggcctactagtgccaccatggactggatttggcgcatccttttccttgtcggcgctgctaccggcgcccattccttcgaacaagttcagcttcaacagcctggcgctgagctggtcaaacctggcgcttctgtgaagatgagctgcaaagccagcggctacgccttcagcagctactggatcaactggatgaagcagaaacccggccagggactcgaatggatcggccaaatctatcccggcgacggcgacaccaactacaacggcaagttcaagggcagagccacactgaccgccgatacctctagcagcacagcctacatgcagctgagcagcctgaccagcgaagatagcgccgtgtacttctgtgcccggtccatcacaacagtcgtgggctgcgctatggactattggggccagggaacaagcgtgaccgtgtctagtacgcgtatccagaaccctgatcctgccgtgtaccagctgcgggatagcaagagcagcgacaagagcgtgtgtctgttcaccgacttcgacagccagaccaacgtgtcccagagcaaggactccgacgtgtacatcaccgataagtgcgtgctggacatgcggagcatggacttcaagagcaactccgccgtggcctggtccaacaagtccgatttcgcctgcgccaacgccttcaacaacagcattatccccgaggacacattcttcccaagccccgagagcagctgcgacgtgaagctggtggaaaagagcttcgagacagacaccaacctgaacttccagaacctgagcgtgatcggcttcagaatcctgctgctgaaagtggccggctttaacctgctgatgaccctgcggctgtggtccagctaa

SEQ ID NO: 8295 - DNA, 1956 bp, synthetic construct
  source 1..1956: mol_type = other DNA
atggccttaccagtgaccgccttgctcctgccgctggccttgctgctccacgccgccaggccggcatgccgcatggaggaccgctacggtaccggcggaggcggatctggcggcggaggtagcggtggcggaggatctgaattcgacatccagatgacacagagccctagcagcctgtctgccagcgtgggagacagagtgaccatcacatgcaaggccagcgaccacatcaacaactggctggcctggtatcagcagaagcctggacaggcccctaagctgctgatctacggcgctaccacactggaaacaggcgtgcccagcagattttctggcagcggctctggcaccgactacaccctgacaatatccagcctccagcctgaggacttcgccacctactactgtcagcagagctggaacaccccttggacattcggccagggcaccaagctggaaatcaagagactcgaggacctgaagaacgtgttcccacctgaggtggccgtgttcgagcctagcgaggccgagatcagccacacccagaaagccaccctcgtgtgcctggctaccggcttctaccccgaccatgtggaactgtcttggtgggtcaacggcaaagaggtgcacagcggcgtgtgtaccgacccccagccactgaaagaacagcccgccctgaacgacagccggtactgcctgagcagcagactgagagtgtccgccaccttctggcagaacccccggaaccacttcagatgccaggtgcagttctacggcctgagcgagaacgacgagtggacccaggacagagccaagcccgtgacccagatcgtgtctgccgaagcctggggcagagccgattgcggctttaccagcgagagctaccagcagggcgtgctgagcgccaccatcctgtacgagatcctgctgggcaaggccaccctgtacgccgtgctggtgtctgccctggtgctgatggctatggtcaagcggaaggacagccggggaagggccaagcgatctggatctggagcaacaaacttctcactactcaaacaagcaggtgacgtggaggagaatcccgggcctactagtgccaccatggactggatttggcgcatccttttccttgtcggcgctgctaccggcgcccattccttcgaacaagttcagcttcaacagcctggcgctgagctggtcaaacctggcgcttctgtgaagatgagctgcaaagccagcggctacgccttcagcagctactggatcaactggatgaagcagaaacccggccagggactcgaatggatcggccaaatctatcccggcgacggcgacaccaactacaacggcaagttcaagggcagagccacactgaccgccgatacctctagcagcacagcctacatgcagctgagcagcctgaccagcgaagatagcgccgtgtacttctgtgcccggtccatcacaacagtcgtgggctgcgctatggactattggggccagggaacaagcgtgaccgtgtctagtacgcgtatccagaaccctgatcctgccgtgtaccagctgcgggatagcaagagcagcgacaagagcgtgtgtctgttcaccgacttcgacagccagaccaacgtgtcccagagcaaggactccgacgtgtacatcaccgataagtgcgtgctggacatgcggagcatggacttcaagagcaactccgccgtggcctggtccaacaagtccgatttcgcctgcgccaacgccttcaacaacagcattatccccgaggacacattcttcccaagccccgagagcagctgcgacgtgaagctggtggaaaagagcttcgagacagacaccaacctgaacttccagaacctgagcgtgatcggcttcagaatcctgctgctgaaagtggccggctttaacctgctgatgaccctgcggctgtggtccagctaa

SEQ ID NO: 8296 - DNA, 1956 bp, synthetic construct
  source 1..1956: mol_type = other DNA
atggccttaccagtgaccgccttgctcctgccgctggccttgctgctccacgccgccaggccggcatgccgcgtggaggaccgctacggtaccggcggaggcggatctggcggcggaggtagcggtggcggaggatctgaattcgacatccagatgacacagagccctagcagcctgtctgccagcgtgggagacagagtgaccatcacatgcaaggccagcgaccacatcaacaactggctggcctggtatcagcagaagcctggacaggcccctaagctgctgatctacggcgctaccacactggaaacaggcgtgcccagcagattttctggcagcggctctggcaccgactacaccctgacaatatccagcctccagcctgaggacttcgccacctactactgtcagcagagctggaacaccccttggacattcggccagggcaccaagctggaaatcaagagactcgaggacctgaagaacgtgttcccacctgaggtggccgtgttcgagcctagcgaggccgagatcagccacacccagaaagccaccctcgtgtgcctggctaccggcttctaccccgaccatgtggaactgtcttggtgggtcaacggcaaagaggtgcacagcggcgtgtgtaccgacccccagccactgaaagaacagcccgccctgaacgacagccggtactgcctgagcagcagactgagagtgtccgccaccttctggcagaacccccggaaccacttcagatgccaggtgcagttctacggcctgagcgagaacgacgagtggacccaggacagagccaagcccgtgacccagatcgtgtctgccgaagcctggggcagagccgattgcggctttaccagcgagagctaccagcagggcgtgctgagcgccaccatcctgtacgagatcctgctgggcaaggccaccctgtacgccgtgctggtgtctgccctggtgctgatggctatggtcaagcggaaggacagccggggaagggccaagcgatctggatctggagcaacaaacttctcactactcaaacaagcaggtgacgtggaggagaatcccgggcctactagtgccaccatggactggatttggcgcatccttttccttgtcggcgctgctaccggcgcccattccttcgaacaagttcagcttcaacagcctggcgctgagctggtcaaacctggcgcttctgtgaagatgagctgcaaagccagcggctacgccttcagcagctactggatcaactggatgaagcagaaacccggccagggactcgaatggatcggccaaatctatcccggcgacggcgacaccaactacaacggcaagttcaagggcagagccacactgaccgccgatacctctagcagcacagcctacatgcagctgagcagcctgaccagcgaagatagcgccgtgtacttctgtgcccggtccatcacaacagtcgtgggctgcgctatggactattggggccagggaacaagcgtgaccgtgtctagtacgcgtatccagaaccctgatcctgccgtgtaccagctgcgggatagcaagagcagcgacaagagcgtgtgtctgttcaccgacttcgacagccagaccaacgtgtcccagagcaaggactccgacgtgtacatcaccgataagtgcgtgctggacatgcggagcatggacttcaagagcaactccgccgtggcctggtccaacaagtccgatttcgcctgcgccaacgccttcaacaacagcattatccccgaggacacattcttcccaagccccgagagcagctgcgacgtgaagctggtggaaaagagcttcgagacagacaccaacctgaacttccagaacctgagcgtgatcggcttcagaatcctgctgctgaaagtggccggctttaacctgctgatgaccctgcggctgtggtccagctaa

SEQ ID NO: 8297 - DNA, 1956 bp, synthetic construct
  source 1..1956: mol_type = other DNA
atggccttaccagtgaccgccttgctcctgccgctggccttgctgctccacgccgccaggccggcatgccgcgccgaggaccgctacggtaccggcggaggcggatctggcggcggaggtagcggtggcggaggatctgaattcgacatccagatgacacagagccctagcagcctgtctgccagcgtgggagacagagtgaccatcacatgcaaggccagcgaccacatcaacaactggctggcctggtatcagcagaagcctggacaggcccctaagctgctgatctacggcgctaccacactggaaacaggcgtgcccagcagattttctggcagcggctctggcaccgactacaccctgacaatatccagcctccagcctgaggacttcgccacctactactgtcagcagagctggaacaccccttggacattcggccagggcaccaagctggaaatcaagagactcgaggacctgaagaacgtgttcccacctgaggtggccgtgttcgagcctagcgaggccgagatcagccacacccagaaagccaccctcgtgtgcctggctaccggcttctaccccgaccatgtggaactgtcttggtgggtcaacggcaaagaggtgcacagcggcgtgtgtaccgacccccagccactgaaagaacagcccgccctgaacgacagccggtactgcctgagcagcagactgagagtgtccgccaccttctggcagaacccccggaaccacttcagatgccaggtgcagttctacggcctgagcgagaacgacgagtggacccaggacagagccaagcccgtgacccagatcgtgtctgccgaagcctggggcagagccgattgcggctttaccagcgagagctaccagcagggcgtgctgagcgccaccatcctgtacgagatcctgctgggcaaggccaccctgtacgccgtgctggtgtctgccctggtgctgatggctatggtcaagcggaaggacagccggggaagggccaagcgatctggatctggagcaacaaacttctcactactcaaacaagcaggtgacgtggaggagaatcccgggcctactagtgccaccatggactggatttggcgcatccttttccttgtcggcgctgctaccggcgcccattccttcgaacaagttcagcttcaacagcctggcgctgagctggtcaaacctggcgcttctgtgaagatgagctgcaaagccagcggctacgccttcagcagctactggatcaactggatgaagcagaaacccggccagggactcgaatggatcggccaaatctatcccggcgacggcgacaccaactacaacggcaagttcaagggcagagccacactgaccgccgatacctctagcagcacagcctacatgcagctgagcagcctgaccagcgaagatagcgccgtgtacttctgtgcccggtccatcacaacagtcgtgggctgcgctatggactattggggccagggaacaagcgtgaccgtgtctagtacgcgtatccagaaccctgatcctgccgtgtaccagctgcgggatagcaagagcagcgacaagagcgtgtgtctgttcaccgacttcgacagccagaccaacgtgtcccagagcaaggactccgacgtgtacatcaccgataagtgcgtgctggacatgcggagcatggacttcaagagcaactccgccgtggcctggtccaacaagtccgatttcgcctgcgccaacgccttcaacaacagcattatccccgaggacacattcttcccaagccccgagagcagctgcgacgtgaagctggtggaaaagagcttcgagacagacaccaacctgaacttccagaacctgagcgtgatcggcttcagaatcctgctgctgaaagtggccggctttaacctgctgatgaccctgcggctgtggtccagctaa

SEQ ID NO: 8298 - DNA, 1956 bp, synthetic construct
  source 1..1956: mol_type = other DNA
atggccttaccagtgaccgccttgctcctgccgctggccttgctgctccacgccgccaggccggcatgccgcttcgaggaccgctacggtaccggcggaggcggatctggcggcggaggtagcggtggcggaggatctgaattcgacatccagatgacacagagccctagcagcctgtctgccagcgtgggagacagagtgaccatcacatgcaaggccagcgaccacatcaacaactggctggcctggtatcagcagaagcctggacaggcccctaagctgctgatctacggcgctaccacactggaaacaggcgtgcccagcagattttctggcagcggctctggcaccgactacaccctgacaatatccagcctccagcctgaggacttcgccacctactactgtcagcagagctggaacaccccttggacattcggccagggcaccaagctggaaatcaagagactcgaggacctgaagaacgtgttcccacctgaggtggccgtgttcgagcctagcgaggccgagatcagccacacccagaaagccaccctcgtgtgcctggctaccggcttctaccccgaccatgtggaactgtcttggtgggtcaacggcaaagaggtgcacagcggcgtgtgtaccgacccccagccactgaaagaacagcccgccctgaacgacagccggtactgcctgagcagcagactgagagtgtccgccaccttctggcagaacccccggaaccacttcagatgccaggtgcagttctacggcctgagcgagaacgacgagtggacccaggacagagccaagcccgtgacccagatcgtgtctgccgaagcctggggcagagccgattgcggctttaccagcgagagctaccagcagggcgtgctgagcgccaccatcctgtacgagatcctgctgggcaaggccaccctgtacgccgtgctggtgtctgccctggtgctgatggctatggtcaagcggaaggacagccggggaagggccaagcgatctggatctggagcaacaaacttctcactactcaaacaagcaggtgacgtggaggagaatcccgggcctactagtgccaccatggactggatttggcgcatccttttccttgtcggcgctgctaccggcgcccattccttcgaacaagttcagcttcaacagcctggcgctgagctggtcaaacctggcgcttctgtgaagatgagctgcaaagccagcggctacgccttcagcagctactggatcaactggatgaagcagaaacccggccagggactcgaatggatcggccaaatctatcccggcgacggcgacaccaactacaacggcaagttcaagggcagagccacactgaccgccgatacctctagcagcacagcctacatgcagctgagcagcctgaccagcgaagatagcgccgtgtacttctgtgcccggtccatcacaacagtcgtgggctgcgctatggactattggggccagggaacaagcgtgaccgtgtctagtacgcgtatccagaaccctgatcctgccgtgtaccagctgcgggatagcaagagcagcgacaagagcgtgtgtctgttcaccgacttcgacagccagaccaacgtgtcccagagcaaggactccgacgtgtacatcaccgataagtgcgtgctggacatgcggagcatggacttcaagagcaactccgccgtggcctggtccaacaagtccgatttcgcctgcgccaacgccttcaacaacagcattatccccgaggacacattcttcccaagccccgagagcagctgcgacgtgaagctggtggaaaagagcttcgagacagacaccaacctgaacttccagaacctgagcgtgatcggcttcagaatcctgctgctgaaagtggccggctttaacctgctgatgaccctgcggctgtggtccagctaa

SEQ ID NO: 8299 - DNA, 1956 bp, synthetic construct
  source 1..1956: mol_type = other DNA
atggccttaccagtgaccgccttgctcctgccgctggccttgctgctccacgccgccaggccggcatgccgccacgaggaccgctacggtaccggcggaggcggatctggcggcggaggtagcggtggcggaggatctgaattcgacatccagatgacacagagccctagcagcctgtctgccagcgtgggagacagagtgaccatcacatgcaaggccagcgaccacatcaacaactggctggcctggtatcagcagaagcctggacaggcccctaagctgctgatctacggcgctaccacactggaaacaggcgtgcccagcagattttctggcagcggctctggcaccgactacaccctgacaatatccagcctccagcctgaggacttcgccacctactactgtcagcagagctggaacaccccttggacattcggccagggcaccaagctggaaatcaagagactcgaggacctgaagaacgtgttcccacctgaggtggccgtgttcgagcctagcgaggccgagatcagccacacccagaaagccaccctcgtgtgcctggctaccggcttctaccccgaccatgtggaactgtcttggtgggtcaacggcaaagaggtgcacagcggcgtgtgtaccgacccccagccactgaaagaacagcccgccctgaacgacagccggtactgcctgagcagcagactgagagtgtccgccaccttctggcagaacccccggaaccacttcagatgccaggtgcagttctacggcctgagcgagaacgacgagtggacccaggacagagccaagcccgtgacccagatcgtgtctgccgaagcctggggcagagccgattgcggctttaccagcgagagctaccagcagggcgtgctgagcgccaccatcctgtacgagatcctgctgggcaaggccaccctgtacgccgtgctggtgtctgccctggtgctgatggctatggtcaagcggaaggacagccggggaagggccaagcgatctggatctggagcaacaaacttctcactactcaaacaagcaggtgacgtggaggagaatcccgggcctactagtgccaccatggactggatttggcgcatccttttccttgtcggcgctgctaccggcgcccattccttcgaacaagttcagcttcaacagcctggcgctgagctggtcaaacctggcgcttctgtgaagatgagctgcaaagccagcggctacgccttcagcagctactggatcaactggatgaagcagaaacccggccagggactcgaatggatcggccaaatctatcccggcgacggcgacaccaactacaacggcaagttcaagggcagagccacactgaccgccgatacctctagcagcacagcctacatgcagctgagcagcctgaccagcgaagatagcgccgtgtacttctgtgcccggtccatcacaacagtcgtgggctgcgctatggactattggggccagggaacaagcgtgaccgtgtctagtacgcgtatccagaaccctgatcctgccgtgtaccagctgcgggatagcaagagcagcgacaagagcgtgtgtctgttcaccgacttcgacagccagaccaacgtgtcccagagcaaggactccgacgtgtacatcaccgataagtgcgtgctggacatgcggagcatggacttcaagagcaactccgccgtggcctggtccaacaagtccgatttcgcctgcgccaacgccttcaacaacagcattatccccgaggacacattcttcccaagccccgagagcagctgcgacgtgaagctggtggaaaagagcttcgagacagacaccaacctgaacttccagaacctgagcgtgatcggcttcagaatcctgctgctgaaagtggccggctttaacctgctgatgaccctgcggctgtggtccagctaa

SEQ ID NO: 8300 - DNA, 1956 bp, synthetic construct
  source 1..1956: mol_type = other DNA
atggccttaccagtgaccgccttgctcctgccgctggccttgctgctccacgccgccaggccggcatgccgcggcgaggaccgctacggtaccggcggaggcggatctggcggcggaggtagcggtggcggaggatctgaattcgacatccagatgacacagagccctagcagcctgtctgccagcgtgggagacagagtgaccatcacatgcaaggccagcgaccacatcaacaactggctggcctggtatcagcagaagcctggacaggcccctaagctgctgatctacggcgctaccacactggaaacaggcgtgcccagcagattttctggcagcggctctggcaccgactacaccctgacaatatccagcctccagcctgaggacttcgccacctactactgtcagcagagctggaacaccccttggacattcggccagggcaccaagctggaaatcaagagactcgaggacctgaagaacgtgttcccacctgaggtggccgtgttcgagcctagcgaggccgagatcagccacacccagaaagccaccctcgtgtgcctggctaccggcttctaccccgaccatgtggaactgtcttggtgggtcaacggcaaagaggtgcacagcggcgtgtgtaccgacccccagccactgaaagaacagcccgccctgaacgacagccggtactgcctgagcagcagactgagagtgtccgccaccttctggcagaacccccggaaccacttcagatgccaggtgcagttctacggcctgagcgagaacgacgagtggacccaggacagagccaagcccgtgacccagatcgtgtctgccgaagcctggggcagagccgattgcggctttaccagcgagagctaccagcagggcgtgctgagcgccaccatcctgtacgagatcctgctgggcaaggccaccctgtacgccgtgctggtgtctgccctggtgctgatggctatggtcaagcggaaggacagccggggaagggccaagcgatctggatctggagcaacaaacttctcactactcaaacaagcaggtgacgtggaggagaatcccgggcctactagtgccaccatggactggatttggcgcatccttttccttgtcggcgctgctaccggcgcccattccttcgaacaagttcagcttcaacagcctggcgctgagctggtcaaacctggcgcttctgtgaagatgagctgcaaagccagcggctacgccttcagcagctactggatcaactggatgaagcagaaacccggccagggactcgaatggatcggccaaatctatcccggcgacggcgacaccaactacaacggcaagttcaagggcagagccacactgaccgccgatacctctagcagcacagcctacatgcagctgagcagcctgaccagcgaagatagcgccgtgtacttctgtgcccggtccatcacaacagtcgtgggctgcgctatggactattggggccagggaacaagcgtgaccgtgtctagtacgcgtatccagaaccctgatcctgccgtgtaccagctgcgggatagcaagagcagcgacaagagcgtgtgtctgttcaccgacttcgacagccagaccaacgtgtcccagagcaaggactccgacgtgtacatcaccgataagtgcgtgctggacatgcggagcatggacttcaagagcaactccgccgtggcctggtccaacaagtccgatttcgcctgcgccaacgccttcaacaacagcattatccccgaggacacattcttcccaagccccgagagcagctgcgacgtgaagctggtggaaaagagcttcgagacagacaccaacctgaacttccagaacctgagcgtgatcggcttcagaatcctgctgctgaaagtggccggctttaacctgctgatgaccctgcggctgtggtccagctaa

SEQ ID NO: 8301 - DNA, 1956 bp, synthetic construct
  source 1..1956: mol_type = other DNA
atggccttaccagtgaccgccttgctcctgccgctggccttgctgctccacgccgccaggccggcatgccgcaccgaggaccgctacggtaccggcggaggcggatctggcggcggaggtagcggtggcggaggatctgaattcgacatccagatgacacagagccctagcagcctgtctgccagcgtgggagacagagtgaccatcacatgcaaggccagcgaccacatcaacaactggctggcctggtatcagcagaagcctggacaggcccctaagctgctgatctacggcgctaccacactggaaacaggcgtgcccagcagattttctggcagcggctctggcaccgactacaccctgacaatatccagcctccagcctgaggacttcgccacctactactgtcagcagagctggaacaccccttggacattcggccagggcaccaagctggaaatcaagagactcgaggacctgaagaacgtgttcccacctgaggtggccgtgttcgagcctagcgaggccgagatcagccacacccagaaagccaccctcgtgtgcctggctaccggcttctaccccgaccatgtggaactgtcttggtgggtcaacggcaaagaggtgcacagcggcgtgtgtaccgacccccagccactgaaagaacagcccgccctgaacgacagccggtactgcctgagcagcagactgagagtgtccgccaccttctggcagaacccccggaaccacttcagatgccaggtgcagttctacggcctgagcgagaacgacgagtggacccaggacagagccaagcccgtgacccagatcgtgtctgccgaagcctggggcagagccgattgcggctttaccagcgagagctaccagcagggcgtgctgagcgccaccatcctgtacgagatcctgctgggcaaggccaccctgtacgccgtgctggtgtctgccctggtgctgatggctatggtcaagcggaaggacagccggggaagggccaagcgatctggatctggagcaacaaacttctcactactcaaacaagcaggtgacgtggaggagaatcccgggcctactagtgccaccatggactggatttggcgcatccttttccttgtcggcgctgctaccggcgcccattccttcgaacaagttcagcttcaacagcctggcgctgagctggtcaaacctggcgcttctgtgaagatgagctgcaaagccagcggctacgccttcagcagctactggatcaactggatgaagcagaaacccggccagggactcgaatggatcggccaaatctatcccggcgacggcgacaccaactacaacggcaagttcaagggcagagccacactgaccgccgatacctctagcagcacagcctacatgcagctgagcagcctgaccagcgaagatagcgccgtgtacttctgtgcccggtccatcacaacagtcgtgggctgcgctatggactattggggccagggaacaagcgtgaccgtgtctagtacgcgtatccagaaccctgatcctgccgtgtaccagctgcgggatagcaagagcagcgacaagagcgtgtgtctgttcaccgacttcgacagccagaccaacgtgtcccagagcaaggactccgacgtgtacatcaccgataagtgcgtgctggacatgcggagcatggacttcaagagcaactccgccgtggcctggtccaacaagtccgatttcgcctgcgccaacgccttcaacaacagcattatccccgaggacacattcttcccaagccccgagagcagctgcgacgtgaagctggtggaaaagagcttcgagacagacaccaacctgaacttccagaacctgagcgtgatcggcttcagaatcctgctgctgaaagtggccggctttaacctgctgatgaccctgcggctgtggtccagctaa

SEQ ID NO: 8302 - DNA, 1956 bp, synthetic construct
  source 1..1956: mol_type = other DNA
atggccttaccagtgaccgccttgctcctgccgctggccttgctgctccacgccgccaggccggcatgcagcagcgaggaccgctacggtaccggcggaggcggatctggcggcggaggtagcggtggcggaggatctgaattcgacatccagatgacacagagccctagcagcctgtctgccagcgtgggagacagagtgaccatcacatgcaaggccagcgaccacatcaacaactggctggcctggtatcagcagaagcctggacaggcccctaagctgctgatctacggcgctaccacactggaaacaggcgtgcccagcagattttctggcagcggctctggcaccgactacaccctgacaatatccagcctccagcctgaggacttcgccacctactactgtcagcagagctggaacaccccttggacattcggccagggcaccaagctggaaatcaagagactcgaggacctgaagaacgtgttcccacctgaggtggccgtgttcgagcctagcgaggccgagatcagccacacccagaaagccaccctcgtgtgcctggctaccggcttctaccccgaccatgtggaactgtcttggtgggtcaacggcaaagaggtgcacagcggcgtgtgtaccgacccccagccactgaaagaacagcccgccctgaacgacagccggtactgcctgagcagcagactgagagtgtccgccaccttctggcagaacccccggaaccacttcagatgccaggtgcagttctacggcctgagcgagaacgacgagtggacccaggacagagccaagcccgtgacccagatcgtgtctgccgaagcctggggcagagccgattgcggctttaccagcgagagctaccagcagggcgtgctgagcgccaccatcctgtacgagatcctgctgggcaaggccaccctgtacgccgtgctggtgtctgccctggtgctgatggctatggtcaagcggaaggacagccggggaagggccaagcgatctggatctggagcaacaaacttctcactactcaaacaagcaggtgacgtggaggagaatcccgggcctactagtgccaccatggactggatttggcgcatccttttccttgtcggcgctgctaccggcgcccattccttcgaacaagttcagcttcaacagcctggcgctgagctggtcaaacctggcgcttctgtgaagatgagctgcaaagccagcggctacgccttcagcagctactggatcaactggatgaagcagaaacccggccagggactcgaatggatcggccaaatctatcccggcgacggcgacaccaactacaacggcaagttcaagggcagagccacactgaccgccgatacctctagcagcacagcctacatgcagctgagcagcctgaccagcgaagatagcgccgtgtacttctgtgcccggtccatcacaacagtcgtgggctgcgctatggactattggggccagggaacaagcgtgaccgtgtctagtacgcgtatccagaaccctgatcctgccgtgtaccagctgcgggatagcaagagcagcgacaagagcgtgtgtctgttcaccgacttcgacagccagaccaacgtgtcccagagcaaggactccgacgtgtacatcaccgataagtgcgtgctggacatgcggagcatggacttcaagagcaactccgccgtggcctggtccaacaagtccgatttcgcctgcgccaacgccttcaacaacagcattatccccgaggacacattcttcccaagccccgagagcagctgcgacgtgaagctggtggaaaagagcttcgagacagacaccaacctgaacttccagaacctgagcgtgatcggcttcagaatcctgctgctgaaagtggccggctttaacctgctgatgaccctgcggctgtggtccagctaa

SEQ ID NO: 8303 - DNA, 1956 bp, synthetic construct
  source 1..1956: mol_type = other DNA
atggccttaccagtgaccgccttgctcctgccgctggccttgctgctccacgccgccaggccggcatgccacagcgaggaccgctacggtaccggcggaggcggatctggcggcggaggtagcggtggcggaggatctgaattcgacatccagatgacacagagccctagcagcctgtctgccagcgtgggagacagagtgaccatcacatgcaaggccagcgaccacatcaacaactggctggcctggtatcagcagaagcctggacaggcccctaagctgctgatctacggcgctaccacactggaaacaggcgtgcccagcagattttctggcagcggctctggcaccgactacaccctgacaatatccagcctccagcctgaggacttcgccacctactactgtcagcagagctggaacaccccttggacattcggccagggcaccaagctggaaatcaagagactcgaggacctgaagaacgtgttcccacctgaggtggccgtgttcgagcctagcgaggccgagatcagccacacccagaaagccaccctcgtgtgcctggctaccggcttctaccccgaccatgtggaactgtcttggtgggtcaacggcaaagaggtgcacagcggcgtgtgtaccgacccccagccactgaaagaacagcccgccctgaacgacagccggtactgcctgagcagcagactgagagtgtccgccaccttctggcagaacccccggaaccacttcagatgccaggtgcagttctacggcctgagcgagaacgacgagtggacccaggacagagccaagcccgtgacccagatcgtgtctgccgaagcctggggcagagccgattgcggctttaccagcgagagctaccagcagggcgtgctgagcgccaccatcctgtacgagatcctgctgggcaaggccaccctgtacgccgtgctggtgtctgccctggtgctgatggctatggtcaagcggaaggacagccggggaagggccaagcgatctggatctggagcaacaaacttctcactactcaaacaagcaggtgacgtggaggagaatcccgggcctactagtgccaccatggactggatttggcgcatccttttccttgtcggcgctgctaccggcgcccattccttcgaacaagttcagcttcaacagcctggcgctgagctggtcaaacctggcgcttctgtgaagatgagctgcaaagccagcggctacgccttcagcagctactggatcaactggatgaagcagaaacccggccagggactcgaatggatcggccaaatctatcccggcgacggcgacaccaactacaacggcaagttcaagggcagagccacactgaccgccgatacctctagcagcacagcctacatgcagctgagcagcctgaccagcgaagatagcgccgtgtacttctgtgcccggtccatcacaacagtcgtgggctgcgctatggactattggggccagggaacaagcgtgaccgtgtctagtacgcgtatccagaaccctgatcctgccgtgtaccagctgcgggatagcaagagcagcgacaagagcgtgtgtctgttcaccgacttcgacagccagaccaacgtgtcccagagcaaggactccgacgtgtacatcaccgataagtgcgtgctggacatgcggagcatggacttcaagagcaactccgccgtggcctggtccaacaagtccgatttcgcctgcgccaacgccttcaacaacagcattatccccgaggacacattcttcccaagccccgagagcagctgcgacgtgaagctggtggaaaagagcttcgagacagacaccaacctgaacttccagaacctgagcgtgatcggcttcagaatcctgctgctgaaagtggccggctttaacctgctgatgaccctgcggctgtggtccagctaa

SEQ ID NO: 8304 - DNA, 1956 bp, synthetic construct
  source 1..1956: mol_type = other DNA
atggccttaccagtgaccgccttgctcctgccgctggccttgctgctccacgccgccaggccggcatgcgacagcgaggaccgctacggtaccggcggaggcggatctggcggcggaggtagcggtggcggaggatctgaattcgacatccagatgacacagagccctagcagcctgtctgccagcgtgggagacagagtgaccatcacatgcaaggccagcgaccacatcaacaactggctggcctggtatcagcagaagcctggacaggcccctaagctgctgatctacggcgctaccacactggaaacaggcgtgcccagcagattttctggcagcggctctggcaccgactacaccctgacaatatccagcctccagcctgaggacttcgccacctactactgtcagcagagctggaacaccccttggacattcggccagggcaccaagctggaaatcaagagactcgaggacctgaagaacgtgttcccacctgaggtggccgtgttcgagcctagcgaggccgagatcagccacacccagaaagccaccctcgtgtgcctggctaccggcttctaccccgaccatgtggaactgtcttggtgggtcaacggcaaagaggtgcacagcggcgtgtgtaccgacccccagccactgaaagaacagcccgccctgaacgacagccggtactgcctgagcagcagactgagagtgtccgccaccttctggcagaacccccggaaccacttcagatgccaggtgcagttctacggcctgagcgagaacgacgagtggacccaggacagagccaagcccgtgacccagatcgtgtctgccgaagcctggggcagagccgattgcggctttaccagcgagagctaccagcagggcgtgctgagcgccaccatcctgtacgagatcctgctgggcaaggccaccctgtacgccgtgctggtgtctgccctggtgctgatggctatggtcaagcggaaggacagccggggaagggccaagcgatctggatctggagcaacaaacttctcactactcaaacaagcaggtgacgtggaggagaatcccgggcctactagtgccaccatggactggatttggcgcatccttttccttgtcggcgctgctaccggcgcccattccttcgaacaagttcagcttcaacagcctggcgctgagctggtcaaacctggcgcttctgtgaagatgagctgcaaagccagcggctacgccttcagcagctactggatcaactggatgaagcagaaacccggccagggactcgaatggatcggccaaatctatcccggcgacggcgacaccaactacaacggcaagttcaagggcagagccacactgaccgccgatacctctagcagcacagcctacatgcagctgagcagcctgaccagcgaagatagcgccgtgtacttctgtgcccggtccatcacaacagtcgtgggctgcgctatggactattggggccagggaacaagcgtgaccgtgtctagtacgcgtatccagaaccctgatcctgccgtgtaccagctgcgggatagcaagagcagcgacaagagcgtgtgtctgttcaccgacttcgacagccagaccaacgtgtcccagagcaaggactccgacgtgtacatcaccgataagtgcgtgctggacatgcggagcatggacttcaagagcaactccgccgtggcctggtccaacaagtccgatttcgcctgcgccaacgccttcaacaacagcattatccccgaggacacattcttcccaagccccgagagcagctgcgacgtgaagctggtggaaaagagcttcgagacagacaccaacctgaacttccagaacctgagcgtgatcggcttcagaatcctgctgctgaaagtggccggctttaacctgctgatgaccctgcggctgtggtccagctaa

SEQ ID NO: 8305 - DNA, 1956 bp, synthetic construct
  source 1..1956: mol_type = other DNA
atggccttaccagtgaccgccttgctcctgccgctggccttgctgctccacgccgccaggccggcatgcttcagcgaggaccgctacggtaccggcggaggcggatctggcggcggaggtagcggtggcggaggatctgaattcgacatccagatgacacagagccctagcagcctgtctgccagcgtgggagacagagtgaccatcacatgcaaggccagcgaccacatcaacaactggctggcctggtatcagcagaagcctggacaggcccctaagctgctgatctacggcgctaccacactggaaacaggcgtgcccagcagattttctggcagcggctctggcaccgactacaccctgacaatatccagcctccagcctgaggacttcgccacctactactgtcagcagagctggaacaccccttggacattcggccagggcaccaagctggaaatcaagagactcgaggacctgaagaacgtgttcccacctgaggtggccgtgttcgagcctagcgaggccgagatcagccacacccagaaagccaccctcgtgtgcctggctaccggcttctaccccgaccatgtggaactgtcttggtgggtcaacggcaaagaggtgcacagcggcgtgtgtaccgacccccagccactgaaagaacagcccgccctgaacgacagccggtactgcctgagcagcagactgagagtgtccgccaccttctggcagaacccccggaaccacttcagatgccaggtgcagttctacggcctgagcgagaacgacgagtggacccaggacagagccaagcccgtgacccagatcgtgtctgccgaagcctggggcagagccgattgcggctttaccagcgagagctaccagcagggcgtgctgagcgccaccatcctgtacgagatcctgctgggcaaggccaccctgtacgccgtgctggtgtctgccctggtgctgatggctatggtcaagcggaaggacagccggggaagggccaagcgatctggatctggagcaacaaacttctcactactcaaacaagcaggtgacgtggaggagaatcccgggcctactagtgccaccatggactggatttggcgcatccttttccttgtcggcgctgctaccggcgcccattccttcgaacaagttcagcttcaacagcctggcgctgagctggtcaaacctggcgcttctgtgaagatgagctgcaaagccagcggctacgccttcagcagctactggatcaactggatgaagcagaaacccggccagggactcgaatggatcggccaaatctatcccggcgacggcgacaccaactacaacggcaagttcaagggcagagccacactgaccgccgatacctctagcagcacagcctacatgcagctgagcagcctgaccagcgaagatagcgccgtgtacttctgtgcccggtccatcacaacagtcgtgggctgcgctatggactattggggccagggaacaagcgtgaccgtgtctagtacgcgtatccagaaccctgatcctgccgtgtaccagctgcgggatagcaagagcagcgacaagagcgtgtgtctgttcaccgacttcgacagccagaccaacgtgtcccagagcaaggactccgacgtgtacatcaccgataagtgcgtgctggacatgcggagcatggacttcaagagcaactccgccgtggcctggtccaacaagtccgatttcgcctgcgccaacgccttcaacaacagcattatccccgaggacacattcttcccaagccccgagagcagctgcgacgtgaagctggtggaaaagagcttcgagacagacaccaacctgaacttccagaacctgagcgtgatcggcttcagaatcctgctgctgaaagtggccggctttaacctgctgatgaccctgcggctgtggtccagctaa

SEQ ID NO: 8306 - DNA, 1962 bp, synthetic construct; identical to SEQ ID NO: 8216
  source 1..1962: mol_type = other DNA

SEQ ID NO: 8307 - DNA, 1962 bp, synthetic construct; identical to SEQ ID NO: 8220
  source 1..1962: mol_type = other DNA

SEQ ID NO: 8308 - DNA, 1962 bp, synthetic construct; identical to SEQ ID NO: 8103
  source 1..1962: mol_type = other DNA

SEQ ID NO: 8309 - DNA, 1962 bp, synthetic construct; identical to SEQ ID NO: 8106
  source 1..1962: mol_type = other DNA

SEQ ID NO: 8310 - DNA, 1971 bp, synthetic construct
  source 1..1971: mol_type = other DNA
atggccttaccagtgaccgccttgctcctgccgctggccttgctgctccacgccgccaggccggcatgcgcccgcagcgaggaccgctaccgcaaccactacggtaccggcggaggcggatctggcggcggaggtagcggtggcggaggatctgaattcgacatccagatgacacagagccctagcagcctgtctgccagcgtgggagacagagtgaccatcacatgcaaggccagcgaccacatcaacaactggctggcctggtatcagcagaagcctggacaggcccctaagctgctgatctacggcgctaccacactggaaacaggcgtgcccagcagattttctggcagcggctctggcaccgactacaccctgacaatatccagcctccagcctgaggacttcgccacctactactgtcagcagagctggaacaccccttggacattcggccagggcaccaagctggaaatcaagagactcgaggacctgaagaacgtgttcccacctgaggtggccgtgttcgagcctagcgaggccgagatcagccacacccagaaagccaccctcgtgtgcctggctaccggcttctaccccgaccatgtggaactgtcttggtgggtcaacggcaaagaggtgcacagcggcgtgtgtaccgacccccagccactgaaagaacagcccgccctgaacgacagccggtactgcctgagcagcagactgagagtgtccgccaccttctggcagaacccccggaaccacttcagatgccaggtgcagttctacggcctgagcgagaacgacgagtggacccaggacagagccaagcccgtgacccagatcgtgtctgccgaagcctggggcagagccgattgcggctttaccagcgagagctaccagcagggcgtgctgagcgccaccatcctgtacgagatcctgctgggcaaggccaccctgtacgccgtgctggtgtctgccctggtgctgatggctatggtcaagcggaaggacagccggggaagggccaagcgatctggatctggagcaacaaacttctcactactcaaacaagcaggtgacgtggaggagaatcccgggcctactagtgccaccatggactggatttggcgcatccttttccttgtcggcgctgctaccggcgcccattccttcgaacaagttcagcttcaacagcctggcgctgagctggtcaaacctggcgcttctgtgaagatgagctgcaaagccagcggctacgccttcagcagctactggatcaactggatgaagcagaaacccggccagggactcgaatggatcggccaaatctatcccggcgacggcgacaccaactacaacggcaagttcaagggcagagccacactgaccgccgatacctctagcagcacagcctacatgcagctgagcagcctgaccagcgaagatagcgccgtgtacttctgtgcccggtccatcacaacagtcgtgggctgcgctatggactattggggccagggaacaagcgtgaccgtgtctagtacgcgtatccagaaccctgatcctgccgtgtaccagctgcgggatagcaagagcagcgacaagagcgtgtgtctgttcaccgacttcgacagccagaccaacgtgtcccagagcaaggactccgacgtgtacatcaccgataagtgcgtgctggacatgcggagcatggacttcaagagcaactccgccgtggcctggtccaacaagtccgatttcgcctgcgccaacgccttcaacaacagcattatccccgaggacacattcttcccaagccccgagagcagctgcgacgtgaagctggtggaaaagagcttcgagacagacaccaacctgaacttccagaacctgagcgtgatcggcttcagaatcctgctgctgaaagtggccggctttaacctgctgatgaccctgcggctgtggtccagctaa

SEQ ID NO: 8311 - DNA, 1971 bp, synthetic construct
  source 1..1971: mol_type = other DNA
atggccttaccagtgaccgccttgctcctgccgctggccttgctgctccacgccgccaggccggcatgcgcccgcagcgaggaccgctaccgcaaccaccccggtaccggcggaggcggatctggcggcggaggtagcggtggcggaggatctgaattcgacatccagatgacacagagccctagcagcctgtctgccagcgtgggagacagagtgaccatcacatgcaaggccagcgaccacatcaacaactggctggcctggtatcagcagaagcctggacaggcccctaagctgctgatctacggcgctaccacactggaaacaggcgtgcccagcagattttctggcagcggctctggcaccgactacaccctgacaatatccagcctccagcctgaggacttcgccacctactactgtcagcagagctggaacaccccttggacattcggccagggcaccaagctggaaatcaagagactcgaggacctgaagaacgtgttcccacctgaggtggccgtgttcgagcctagcgaggccgagatcagccacacccagaaagccaccctcgtgtgcctggctaccggcttctaccccgaccatgtggaactgtcttggtgggtcaacggcaaagaggtgcacagcggcgtgtgtaccgacccccagccactgaaagaacagcccgccctgaacgacagccggtactgcctgagcagcagactgagagtgtccgccaccttctggcagaacccccggaaccacttcagatgccaggtgcagttctacggcctgagcgagaacgacgagtggacccaggacagagccaagcccgtgacccagatcgtgtctgccgaagcctggggcagagccgattgcggctttaccagcgagagctaccagcagggcgtgctgagcgccaccatcctgtacgagatcctgctgggcaaggccaccctgtacgccgtgctggtgtctgccctggtgctgatggctatggtcaagcggaaggacagccggggaagggccaagcgatctggatctggagcaacaaacttctcactactcaaacaagcaggtgacgtggaggagaatcccgggcctactagtgccaccatggactggatttggcgcatccttttccttgtcggcgctgctaccggcgcccattccttcgaacaagttcagcttcaacagcctggcgctgagctggtcaaacctggcgcttctgtgaagatgagctgcaaagccagcggctacgccttcagcagctactggatcaactggatgaagcagaaacccggccagggactcgaatggatcggccaaatctatcccggcgacggcgacaccaactacaacggcaagttcaagggcagagccacactgaccgccgatacctctagcagcacagcctacatgcagctgagcagcctgaccagcgaagatagcgccgtgtacttctgtgcccggtccatcacaacagtcgtgggctgcgctatggactattggggccagggaacaagcgtgaccgtgtctagtacgcgtatccagaaccctgatcctgccgtgtaccagctgcgggatagcaagagcagcgacaagagcgtgtgtctgttcaccgacttcgacagccagaccaacgtgtcccagagcaaggactccgacgtgtacatcaccgataagtgcgtgctggacatgcggagcatggacttcaagagcaactccgccgtggcctggtccaacaagtccgatttcgcctgcgccaacgccttcaacaacagcattatccccgaggacacattcttcccaagccccgagagcagctgcgacgtgaagctggtggaaaagagcttcgagacagacaccaacctgaacttccagaacctgagcgtgatcggcttcagaatcctgctgctgaaagtggccggctttaacctgctgatgaccctgcggctgtggtccagctaa

SEQ ID NO: 8312 - DNA, 1971 bp, synthetic construct
  source 1..1971: mol_type = other DNA
atggccttaccagtgaccgccttgctcctgccgctggccttgctgctccacgccgccaggccggcatgcgcccgcagcgaggaccgctaccgcaaccacgccggtaccggcggaggcggatctggcggcggaggtagcggtggcggaggatctgaattcgacatccagatgacacagagccctagcagcctgtctgccagcgtgggagacagagtgaccatcacatgcaaggccagcgaccacatcaacaactggctggcctggtatcagcagaagcctggacaggcccctaagctgctgatctacggcgctaccacactggaaacaggcgtgcccagcagattttctggcagcggctctggcaccgactacaccctgacaatatccagcctccagcctgaggacttcgccacctactactgtcagcagagctggaacaccccttggacattcggccagggcaccaagctggaaatcaagagactcgaggacctgaagaacgtgttcccacctgaggtggccgtgttcgagcctagcgaggccgagatcagccacacccagaaagccaccctcgtgtgcctggctaccggcttctaccccgaccatgtggaactgtcttggtgggtcaacggcaaagaggtgcacagcggcgtgtgtaccgacccccagccactgaaagaacagcccgccctgaacgacagccggtactgcctgagcagcagactgagagtgtccgccaccttctggcagaacccccggaaccacttcagatgccaggtgcagttctacggcctgagcgagaacgacgagtggacccaggacagagccaagcccgtgacccagatcgtgtctgccgaagcctggggcagagccgattgcggctttaccagcgagagctaccagcagggcgtgctgagcgccaccatcctgtacgagatcctgctgggcaaggccaccctgtacgccgtgctggtgtctgccctggtgctgatggctatggtcaagcggaaggacagccggggaagggccaagcgatctggatctggagcaacaaacttctcactactcaaacaagcaggtgacgtggaggagaatcccgggcctactagtgccaccatggactggatttggcgcatccttttccttgtcggcgctgctaccggcgcccattccttcgaacaagttcagcttcaacagcctggcgctgagctggtcaaacctggcgcttctgtgaagatgagctgcaaagccagcggctacgccttcagcagctactggatcaactggatgaagcagaaacccggccagggactcgaatggatcggccaaatctatcccggcgacggcgacaccaactacaacggcaagttcaagggcagagccacactgaccgccgatacctctagcagcacagcctacatgcagctgagcagcctgaccagcgaagatagcgccgtgtacttctgtgcccggtccatcacaacagtcgtgggctgcgctatggactattggggccagggaacaagcgtgaccgtgtctagtacgcgtatccagaaccctgatcctgccgtgtaccagctgcgggatagcaagagcagcgacaagagcgtgtgtctgttcaccgacttcgacagccagaccaacgtgtcccagagcaaggactccgacgtgtacatcaccgataagtgcgtgctggacatgcggagcatggacttcaagagcaactccgccgtggcctggtccaacaagtccgatttcgcctgcgccaacgccttcaacaacagcattatccccgaggacacattcttcccaagccccgagagcagctgcgacgtgaagctggtggaaaagagcttcgagacagacaccaacctgaacttccagaacctgagcgtgatcggcttcagaatcctgctgctgaaagtggccggctttaacctgctgatgaccctgcggctgtggtccagctaa

SEQ ID NO: 8313 - DNA, 1971 bp, synthetic construct; identical to SEQ ID NO: 8089
  source 1..1971: mol_type = other DNA

SEQ ID NO: 8314 - DNA, 1971 bp, synthetic construct
  source 1..1971: mol_type = other DNA
atggccttaccagtgaccgccttgctcctgccgctggccttgctgctccacgccgccaggccggcatgcgcccgcagcgaggaccgctaccgcaaccgccacggtaccggcggaggcggatctggcggcggaggtagcggtggcggaggatctgaattcgacatccagatgacacagagccctagcagcctgtctgccagcgtgggagacagagtgaccatcacatgcaaggccagcgaccacatcaacaactggctggcctggtatcagcagaagcctggacaggcccctaagctgctgatctacggcgctaccacactggaaacaggcgtgcccagcagattttctggcagcggctctggcaccgactacaccctgacaatatccagcctccagcctgaggacttcgccacctactactgtcagcagagctggaacaccccttggacattcggccagggcaccaagctggaaatcaagagactcgaggacctgaagaacgtgttcccacctgaggtggccgtgttcgagcctagcgaggccgagatcagccacacccagaaagccaccctcgtgtgcctggctaccggcttctaccccgaccatgtggaactgtcttggtgggtcaacggcaaagaggtgcacagcggcgtgtgtaccgacccccagccactgaaagaacagcccgccctgaacgacagccggtactgcctgagcagcagactgagagtgtccgccaccttctggcagaacccccggaaccacttcagatgccaggtgcagttctacggcctgagcgagaacgacgagtggacccaggacagagccaagcccgtgacccagatcgtgtctgccgaagcctggggcagagccgattgcggctttaccagcgagagctaccagcagggcgtgctgagcgccaccatcctgtacgagatcctgctgggcaaggccaccctgtacgccgtgctggtgtctgccctggtgctgatggctatggtcaagcggaaggacagccggggaagggccaagcgatctggatctggagcaacaaacttctcactactcaaacaagcaggtgacgtggaggagaatcccgggcctactagtgccaccatggactggatttggcgcatccttttccttgtcggcgctgctaccggcgcccattccttcgaacaagttcagcttcaacagcctggcgctgagctggtcaaacctggcgcttctgtgaagatgagctgcaaagccagcggctacgccttcagcagctactggatcaactggatgaagcagaaacccggccagggactcgaatggatcggccaaatctatcccggcgacggcgacaccaactacaacggcaagttcaagggcagagccacactgaccgccgatacctctagcagcacagcctacatgcagctgagcagcctgaccagcgaagatagcgccgtgtacttctgtgcccggtccatcacaacagtcgtgggctgcgctatggactattggggccagggaacaagcgtgaccgtgtctagtacgcgtatccagaaccctgatcctgccgtgtaccagctgcgggatagcaagagcagcgacaagagcgtgtgtctgttcaccgacttcgacagccagaccaacgtgtcccagagcaaggactccgacgtgtacatcaccgataagtgcgtgctggacatgcggagcatggacttcaagagcaactccgccgtggcctggtccaacaagtccgatttcgcctgcgccaacgccttcaacaacagcattatccccgaggacacattcttcccaagccccgagagcagctgcgacgtgaagctggtggaaaagagcttcgagacagacaccaacctgaacttccagaacctgagcgtgatcggcttcagaatcctgctgctgaaagtggccggctttaacctgctgatgaccctgcggctgtggtccagctaa

SEQ ID NO: 8315 - DNA, 1971 bp, synthetic construct
  source 1..1971: mol_type = other DNA
atggccttaccagtgaccgccttgctcctgccgctggccttgctgctccacgccgccaggccggcatgcgcccgcagcgaggaccgctaccgcaacctgcgcggtaccggcggaggcggatctggcggcggaggtagcggtggcggaggatctgaattcgacatccagatgacacagagccctagcagcctgtctgccagcgtgggagacagagtgaccatcacatgcaaggccagcgaccacatcaacaactggctggcctggtatcagcagaagcctggacaggcccctaagctgctgatctacggcgctaccacactggaaacaggcgtgcccagcagattttctggcagcggctctggcaccgactacaccctgacaatatccagcctccagcctgaggacttcgccacctactactgtcagcagagctggaacaccccttggacattcggccagggcaccaagctggaaatcaagagactcgaggacctgaagaacgtgttcccacctgaggtggccgtgttcgagcctagcgaggccgagatcagccacacccagaaagccaccctcgtgtgcctggctaccggcttctaccccgaccatgtggaactgtcttggtgggtcaacggcaaagaggtgcacagcggcgtgtgtaccgacccccagccactgaaagaacagcccgccctgaacgacagccggtactgcctgagcagcagactgagagtgtccgccaccttctggcagaacccccggaaccacttcagatgccaggtgcagttctacggcctgagcgagaacgacgagtggacccaggacagagccaagcccgtgacccagatcgtgtctgccgaagcctggggcagagccgattgcggctttaccagcgagagctaccagcagggcgtgctgagcgccaccatcctgtacgagatcctgctgggcaaggccaccctgtacgccgtgctggtgtctgccctggtgctgatggctatggtcaagcggaaggacagccggggaagggccaagcgatctggatctggagcaacaaacttctcactactcaaacaagcaggtgacgtggaggagaatcccgggcctactagtgccaccatggactggatttggcgcatccttttccttgtcggcgctgctaccggcgcccattccttcgaacaagttcagcttcaacagcctggcgctgagctggtcaaacctggcgcttctgtgaagatgagctgcaaagccagcggctacgccttcagcagctactggatcaactggatgaagcagaaacccggccagggactcgaatggatcggccaaatctatcccggcgacggcgacaccaactacaacggcaagttcaagggcagagccacactgaccgccgatacctctagcagcacagcctacatgcagctgagcagcctgaccagcgaagatagcgccgtgtacttctgtgcccggtccatcacaacagtcgtgggctgcgctatggactattggggccagggaacaagcgtgaccgtgtctagtacgcgtatccagaaccctgatcctgccgtgtaccagctgcgggatagcaagagcagcgacaagagcgtgtgtctgttcaccgacttcgacagccagaccaacgtgtcccagagcaaggactccgacgtgtacatcaccgataagtgcgtgctggacatgcggagcatggacttcaagagcaactccgccgtggcctggtccaacaagtccgatttcgcctgcgccaacgccttcaacaacagcattatccccgaggacacattcttcccaagccccgagagcagctgcgacgtgaagctggtggaaaagagcttcgagacagacaccaacctgaacttccagaacctgagcgtgatcggcttcagaatcctgctgctgaaagtggccggctttaacctgctgatgaccctgcggctgtggtccagctaa

SEQ ID NO: 8316 - DNA, 1971 bp, synthetic construct
  source 1..1971: mol_type = other DNA
atggccttaccagtgaccgccttgctcctgccgctggccttgctgctccacgccgccaggccggcatgcgcccgcagcgaggaccgctaccgcaaccgcctgggtaccggcggaggcggatctggcggcggaggtagcggtggcggaggatctgaattcgacatccagatgacacagagccctagcagcctgtctgccagcgtgggagacagagtgaccatcacatgcaaggccagcgaccacatcaacaactggctggcctggtatcagcagaagcctggacaggcccctaagctgctgatctacggcgctaccacactggaaacaggcgtgcccagcagattttctggcagcggctctggcaccgactacaccctgacaatatccagcctccagcctgaggacttcgccacctactactgtcagcagagctggaacaccccttggacattcggccagggcaccaagctggaaatcaagagactcgaggacctgaagaacgtgttcccacctgaggtggccgtgttcgagcctagcgaggccgagatcagccacacccagaaagccaccctcgtgtgcctggctaccggcttctaccccgaccatgtggaactgtcttggtgggtcaacggcaaagaggtgcacagcggcgtgtgtaccgacccccagccactgaaagaacagcccgccctgaacgacagccggtactgcctgagcagcagactgagagtgtccgccaccttctggcagaacccccggaaccacttcagatgccaggtgcagttctacggcctgagcgagaacgacgagtggacccaggacagagccaagcccgtgacccagatcgtgtctgccgaagcctggggcagagccgattgcggctttaccagcgagagctaccagcagggcgtgctgagcgccaccatcctgtacgagatcctgctgggcaaggccaccctgtacgccgtgctggtgtctgccctggtgctgatggctatggtcaagcggaaggacagccggggaagggccaagcgatctggatctggagcaacaaacttctcactactcaaacaagcaggtgacgtggaggagaatcccgggcctactagtgccaccatggactggatttggcgcatccttttccttgtcggcgctgctaccggcgcccattccttcgaacaagttcagcttcaacagcctggcgctgagctggtcaaacctggcgcttctgtgaagatgagctgcaaagccagcggctacgccttcagcagctactggatcaactggatgaagcagaaacccggccagggactcgaatggatcggccaaatctatcccggcgacggcgacaccaactacaacggcaagttcaagggcagagccacactgaccgccgatacctctagcagcacagcctacatgcagctgagcagcctgaccagcgaagatagcgccgtgtacttctgtgcccggtccatcacaacagtcgtgggctgcgctatggactattggggccagggaacaagcgtgaccgtgtctagtacgcgtatccagaaccctgatcctgccgtgtaccagctgcgggatagcaagagcagcgacaagagcgtgtgtctgttcaccgacttcgacagccagaccaacgtgtcccagagcaaggactccgacgtgtacatcaccgataagtgcgtgctggacatgcggagcatggacttcaagagcaactccgccgtggcctggtccaacaagtccgatttcgcctgcgccaacgccttcaacaacagcattatccccgaggacacattcttcccaagccccgagagcagctgcgacgtgaagctggtggaaaagagcttcgagacagacaccaacctgaacttccagaacctgagcgtgatcggcttcagaatcctgctgctgaaagtggccggctttaacctgctgatgaccctgcggctgtggtccagctaa

SEQ ID NO: 8317 - DNA, 1971 bp, synthetic construct
  source 1..1971: mol_type = other DNA
atggccttaccagtgaccgccttgctcctgccgctggccttgctgctccacgccgccaggccggcatgcgcccgcagcgaggaccgctaccgcaaccccaccggtaccggcggaggcggatctggcggcggaggtagcggtggcggaggatctgaattcgacatccagatgacacagagccctagcagcctgtctgccagcgtgggagacagagtgaccatcacatgcaaggccagcgaccacatcaacaactggctggcctggtatcagcagaagcctggacaggcccctaagctgctgatctacggcgctaccacactggaaacaggcgtgcccagcagattttctggcagcggctctggcaccgactacaccctgacaatatccagcctccagcctgaggacttcgccacctactactgtcagcagagctggaacaccccttggacattcggccagggcaccaagctggaaatcaagagactcgaggacctgaagaacgtgttcccacctgaggtggccgtgttcgagcctagcgaggccgagatcagccacacccagaaagccaccctcgtgtgcctggctaccggcttctaccccgaccatgtggaactgtcttggtgggtcaacggcaaagaggtgcacagcggcgtgtgtaccgacccccagccactgaaagaacagcccgccctgaacgacagccggtactgcctgagcagcagactgagagtgtccgccaccttctggcagaacccccggaaccacttcagatgccaggtgcagttctacggcctgagcgagaacgacgagtggacccaggacagagccaagcccgtgacccagatcgtgtctgccgaagcctggggcagagccgattgcggctttaccagcgagagctaccagcagggcgtgctgagcgccaccatcctgtacgagatcctgctgggcaaggccaccctgtacgccgtgctggtgtctgccctggtgctgatggctatggtcaagcggaaggacagccggggaagggccaagcgatctggatctggagcaacaaacttctcactactcaaacaagcaggtgacgtggaggagaatcccgggcctactagtgccaccatggactggatttggcgcatccttttccttgtcggcgctgctaccggcgcccattccttcgaacaagttcagcttcaacagcctggcgctgagctggtcaaacctggcgcttctgtgaagatgagctgcaaagccagcggctacgccttcagcagctactggatcaactggatgaagcagaaacccggccagggactcgaatggatcggccaaatctatcccggcgacggcgacaccaactacaacggcaagttcaagggcagagccacactgaccgccgatacctctagcagcacagcctacatgcagctgagcagcctgaccagcgaagatagcgccgtgtacttctgtgcccggtccatcacaacagtcgtgggctgcgctatggactattggggccagggaacaagcgtgaccgtgtctagtacgcgtatccagaaccctgatcctgccgtgtaccagctgcgggatagcaagagcagcgacaagagcgtgtgtctgttcaccgacttcgacagccagaccaacgtgtcccagagcaaggactccgacgtgtacatcaccgataagtgcgtgctggacatgcggagcatggacttcaagagcaactccgccgtggcctggtccaacaagtccgatttcgcctgcgccaacgccttcaacaacagcattatccccgaggacacattcttcccaagccccgagagcagctgcgacgtgaagctggtggaaaagagcttcgagacagacaccaacctgaacttccagaacctgagcgtgatcggcttcagaatcctgctgctgaaagtggccggctttaacctgctgatgaccctgcggctgtggtccagctaa

SEQ ID NO: 8318 - DNA, 1971 bp, synthetic construct
  source 1..1971: mol_type = other DNA
atggccttaccagtgaccgccttgctcctgccgctggccttgctgctccacgccgccaggccggcatgcgcccgcagcgaggaccgctaccgcaaccacagcggtaccggcggaggcggatctggcggcggaggtagcggtggcggaggatctgaattcgacatccagatgacacagagccctagcagcctgtctgccagcgtgggagacagagtgaccatcacatgcaaggccagcgaccacatcaacaactggctggcctggtatcagcagaagcctggacaggcccctaagctgctgatctacggcgctaccacactggaaacaggcgtgcccagcagattttctggcagcggctctggcaccgactacaccctgacaatatccagcctccagcctgaggacttcgccacctactactgtcagcagagctggaacaccccttggacattcggccagggcaccaagctggaaatcaagagactcgaggacctgaagaacgtgttcccacctgaggtggccgtgttcgagcctagcgaggccgagatcagccacacccagaaagccaccctcgtgtgcctggctaccggcttctaccccgaccatgtggaactgtcttggtgggtcaacggcaaagaggtgcacagcggcgtgtgtaccgacccccagccactgaaagaacagcccgccctgaacgacagccggtactgcctgagcagcagactgagagtgtccgccaccttctggcagaacccccggaaccacttcagatgccaggtgcagttctacggcctgagcgagaacgacgagtggacccaggacagagccaagcccgtgacccagatcgtgtctgccgaagcctggggcagagccgattgcggctttaccagcgagagctaccagcagggcgtgctgagcgccaccatcctgtacgagatcctgctgggcaaggccaccctgtacgccgtgctggtgtctgccctggtgctgatggctatggtcaagcggaaggacagccggggaagggccaagcgatctggatctggagcaacaaacttctcactactcaaacaagcaggtgacgtggaggagaatcccgggcctactagtgccaccatggactggatttggcgcatccttttccttgtcggcgctgctaccggcgcccattccttcgaacaagttcagcttcaacagcctggcgctgagctggtcaaacctggcgcttctgtgaagatgagctgcaaagccagcggctacgccttcagcagctactggatcaactggatgaagcagaaacccggccagggactcgaatggatcggccaaatctatcccggcgacggcgacaccaactacaacggcaagttcaagggcagagccacactgaccgccgatacctctagcagcacagcctacatgcagctgagcagcctgaccagcgaagatagcgccgtgtacttctgtgcccggtccatcacaacagtcgtgggctgcgctatggactattggggccagggaacaagcgtgaccgtgtctagtacgcgtatccagaaccctgatcctgccgtgtaccagctgcgggatagcaagagcagcgacaagagcgtgtgtctgttcaccgacttcgacagccagaccaacgtgtcccagagcaaggactccgacgtgtacatcaccgataagtgcgtgctggacatgcggagcatggacttcaagagcaactccgccgtggcctggtccaacaagtccgatttcgcctgcgccaacgccttcaacaacagcattatccccgaggacacattcttcccaagccccgagagcagctgcgacgtgaagctggtggaaaagagcttcgagacagacaccaacctgaacttccagaacctgagcgtgatcggcttcagaatcctgctgctgaaagtggccggctttaacctgctgatgaccctgcggctgtggtccagctaa

SEQ ID NO: 8319 - DNA, 1959 bp, synthetic construct
  source 1..1959: mol_type = other DNA
atggccttaccagtgaccgccttgctcctgccgctggccttgctgctccacgccgccaggccggcatgcgccaagagcgaggacctgtacggtaccggcggaggcggatctggcggcggaggtagcggtggcggaggatctgaattcgacatccagatgacacagagccctagcagcctgtctgccagcgtgggagacagagtgaccatcacatgcaaggccagcgaccacatcaacaactggctggcctggtatcagcagaagcctggacaggcccctaagctgctgatctacggcgctaccacactggaaacaggcgtgcccagcagattttctggcagcggctctggcaccgactacaccctgacaatatccagcctccagcctgaggacttcgccacctactactgtcagcagagctggaacaccccttggacattcggccagggcaccaagctggaaatcaagagactcgaggacctgaagaacgtgttcccacctgaggtggccgtgttcgagcctagcgaggccgagatcagccacacccagaaagccaccctcgtgtgcctggctaccggcttctaccccgaccatgtggaactgtcttggtgggtcaacggcaaagaggtgcacagcggcgtgtgtaccgacccccagccactgaaagaacagcccgccctgaacgacagccggtactgcctgagcagcagactgagagtgtccgccaccttctggcagaacccccggaaccacttcagatgccaggtgcagttctacggcctgagcgagaacgacgagtggacccaggacagagccaagcccgtgacccagatcgtgtctgccgaagcctggggcagagccgattgcggctttaccagcgagagctaccagcagggcgtgctgagcgccaccatcctgtacgagatcctgctgggcaaggccaccctgtacgccgtgctggtgtctgccctggtgctgatggctatggtcaagcggaaggacagccggggaagggccaagcgatctggatctggagcaacaaacttctcactactcaaacaagcaggtgacgtggaggagaatcccgggcctactagtgccaccatggactggatttggcgcatccttttccttgtcggcgctgctaccggcgcccattccttcgaacaagttcagcttcaacagcctggcgctgagctggtcaaacctggcgcttctgtgaagatgagctgcaaagccagcggctacgccttcagcagctactggatcaactggatgaagcagaaacccggccagggactcgaatggatcggccaaatctatcccggcgacggcgacaccaactacaacggcaagttcaagggcagagccacactgaccgccgatacctctagcagcacagcctacatgcagctgagcagcctgaccagcgaagatagcgccgtgtacttctgtgcccggtccatcacaacagtcgtgggctgcgctatggactattggggccagggaacaagcgtgaccgtgtctagtacgcgtatccagaaccctgatcctgccgtgtaccagctgcgggatagcaagagcagcgacaagagcgtgtgtctgttcaccgacttcgacagccagaccaacgtgtcccagagcaaggactccgacgtgtacatcaccgataagtgcgtgctggacatgcggagcatggacttcaagagcaactccgccgtggcctggtccaacaagtccgatttcgcctgcgccaacgccttcaacaacagcattatccccgaggacacattcttcccaagccccgagagcagctgcgacgtgaagctggtggaaaagagcttcgagacagacaccaacctgaacttccagaacctgagcgtgatcggcttcagaatcctgctgctgaaagtggccggctttaacctgctgatgaccctgcggctgtggtccagctaa

SEQ ID NO: 8320 - DNA, 1986 bp, synthetic construct
  source 1..1986: mol_type = other DNA
atggccttaccagtgaccgccttgctcctgccgctggccttgctgctccacgccgccaggccggcatgcgcccgccccgccaagagcgaggacctgtaccccaaccccaagggcagcggtaccggcggaggcggatctggcggcggaggtagcggtggcggaggatctgaattcgacatccagatgacacagagccctagcagcctgtctgccagcgtgggagacagagtgaccatcacatgcaaggccagcgaccacatcaacaactggctggcctggtatcagcagaagcctggacaggcccctaagctgctgatctacggcgctaccacactggaaacaggcgtgcccagcagattttctggcagcggctctggcaccgactacaccctgacaatatccagcctccagcctgaggacttcgccacctactactgtcagcagagctggaacaccccttggacattcggccagggcaccaagctggaaatcaagagactcgaggacctgaagaacgtgttcccacctgaggtggccgtgttcgagcctagcgaggccgagatcagccacacccagaaagccaccctcgtgtgcctggctaccggcttctaccccgaccatgtggaactgtcttggtgggtcaacggcaaagaggtgcacagcggcgtgtgtaccgacccccagccactgaaagaacagcccgccctgaacgacagccggtactgcctgagcagcagactgagagtgtccgccaccttctggcagaacccccggaaccacttcagatgccaggtgcagttctacggcctgagcgagaacgacgagtggacccaggacagagccaagcccgtgacccagatcgtgtctgccgaagcctggggcagagccgattgcggctttaccagcgagagctaccagcagggcgtgctgagcgccaccatcctgtacgagatcctgctgggcaaggccaccctgtacgccgtgctggtgtctgccctggtgctgatggctatggtcaagcggaaggacagccggggaagggccaagcgatctggatctggagcaacaaacttctcactactcaaacaagcaggtgacgtggaggagaatcccgggcctactagtgccaccatggactggatttggcgcatccttttccttgtcggcgctgctaccggcgcccattccttcgaacaagttcagcttcaacagcctggcgctgagctggtcaaacctggcgcttctgtgaagatgagctgcaaagccagcggctacgccttcagcagctactggatcaactggatgaagcagaaacccggccagggactcgaatggatcggccaaatctatcccggcgacggcgacaccaactacaacggcaagttcaagggcagagccacactgaccgccgatacctctagcagcacagcctacatgcagctgagcagcctgaccagcgaagatagcgccgtgtacttctgtgcccggtccatcacaacagtcgtgggctgcgctatggactattggggccagggaacaagcgtgaccgtgtctagtacgcgtatccagaaccctgatcctgccgtgtaccagctgcgggatagcaagagcagcgacaagagcgtgtgtctgttcaccgacttcgacagccagaccaacgtgtcccagagcaaggactccgacgtgtacatcaccgataagtgcgtgctggacatgcggagcatggacttcaagagcaactccgccgtggcctggtccaacaagtccgatttcgcctgcgccaacgccttcaacaacagcattatccccgaggacacattcttcccaagccccgagagcagctgcgacgtgaagctggtggaaaagagcttcgagacagacaccaacctgaacttccagaacctgagcgtgatcggcttcagaatcctgctgctgaaagtggccggctttaacctgctgatgaccctgcggctgtggtccagctaa

SEQ ID NO: 8321 - DNA, 1983 bp, synthetic construct
  source 1..1983: mol_type = other DNA
atggccttaccagtgaccgccttgctcctgccgctggccttgctgctccacgccgccaggccggcatgcgcccgccccgccaagagcgaggacctgtaccccaaccccaagggcggtaccggcggaggcggatctggcggcggaggtagcggtggcggaggatctgaattcgacatccagatgacacagagccctagcagcctgtctgccagcgtgggagacagagtgaccatcacatgcaaggccagcgaccacatcaacaactggctggcctggtatcagcagaagcctggacaggcccctaagctgctgatctacggcgctaccacactggaaacaggcgtgcccagcagattttctggcagcggctctggcaccgactacaccctgacaatatccagcctccagcctgaggacttcgccacctactactgtcagcagagctggaacaccccttggacattcggccagggcaccaagctggaaatcaagagactcgaggacctgaagaacgtgttcccacctgaggtggccgtgttcgagcctagcgaggccgagatcagccacacccagaaagccaccctcgtgtgcctggctaccggcttctaccccgaccatgtggaactgtcttggtgggtcaacggcaaagaggtgcacagcggcgtgtgtaccgacccccagccactgaaagaacagcccgccctgaacgacagccggtactgcctgagcagcagactgagagtgtccgccaccttctggcagaacccccggaaccacttcagatgccaggtgcagttctacggcctgagcgagaacgacgagtggacccaggacagagccaagcccgtgacccagatcgtgtctgccgaagcctggggcagagccgattgcggctttaccagcgagagctaccagcagggcgtgctgagcgccaccatcctgtacgagatcctgctgggcaaggccaccctgtacgccgtgctggtgtctgccctggtgctgatggctatggtcaagcggaaggacagccggggaagggccaagcgatctggatctggagcaacaaacttctcactactcaaacaagcaggtgacgtggaggagaatcccgggcctactagtgccaccatggactggatttggcgcatccttttccttgtcggcgctgctaccggcgcccattccttcgaacaagttcagcttcaacagcctggcgctgagctggtcaaacctggcgcttctgtgaagatgagctgcaaagccagcggctacgccttcagcagctactggatcaactggatgaagcagaaacccggccagggactcgaatggatcggccaaatctatcccggcgacggcgacaccaactacaacggcaagttcaagggcagagccacactgaccgccgatacctctagcagcacagcctacatgcagctgagcagcctgaccagcgaagatagcgccgtgtacttctgtgcccggtccatcacaacagtcgtgggctgcgctatggactattggggccagggaacaagcgtgaccgtgtctagtacgcgtatccagaaccctgatcctgccgtgtaccagctgcgggatagcaagagcagcgacaagagcgtgtgtctgttcaccgacttcgacagccagaccaacgtgtcccagagcaaggactccgacgtgtacatcaccgataagtgcgtgctggacatgcggagcatggacttcaagagcaactccgccgtggcctggtccaacaagtccgatttcgcctgcgccaacgccttcaacaacagcattatccccgaggacacattcttcccaagccccgagagcagctgcgacgtgaagctggtggaaaagagcttcgagacagacaccaacctgaacttccagaacctgagcgtgatcggcttcagaatcctgctgctgaaagtggccggctttaacctgctgatgaccctgcggctgtggtccagctaa

SEQ ID NO: 8322 - DNA, 1980 bp, synthetic construct
  source 1..1980: mol_type = other DNA
atggccttaccagtgaccgccttgctcctgccgctggccttgctgctccacgccgccaggccggcatgcgcccgccccgccaagagcgaggacctgtaccccaaccccaagggtaccggcggaggcggatctggcggcggaggtagcggtggcggaggatctgaattcgacatccagatgacacagagccctagcagcctgtctgccagcgtgggagacagagtgaccatcacatgcaaggccagcgaccacatcaacaactggctggcctggtatcagcagaagcctggacaggcccctaagctgctgatctacggcgctaccacactggaaacaggcgtgcccagcagattttctggcagcggctctggcaccgactacaccctgacaatatccagcctccagcctgaggacttcgccacctactactgtcagcagagctggaacaccccttggacattcggccagggcaccaagctggaaatcaagagactcgaggacctgaagaacgtgttcccacctgaggtggccgtgttcgagcctagcgaggccgagatcagccacacccagaaagccaccctcgtgtgcctggctaccggcttctaccccgaccatgtggaactgtcttggtgggtcaacggcaaagaggtgcacagcggcgtgtgtaccgacccccagccactgaaagaacagcccgccctgaacgacagccggtactgcctgagcagcagactgagagtgtccgccaccttctggcagaacccccggaaccacttcagatgccaggtgcagttctacggcctgagcgagaacgacgagtggacccaggacagagccaagcccgtgacccagatcgtgtctgccgaagcctggggcagagccgattgcggctttaccagcgagagctaccagcagggcgtgctgagcgccaccatcctgtacgagatcctgctgggcaaggccaccctgtacgccgtgctggtgtctgccctggtgctgatggctatggtcaagcggaaggacagccggggaagggccaagcgatctggatctggagcaacaaacttctcactactcaaacaagcaggtgacgtggaggagaatcccgggcctactagtgccaccatggactggatttggcgcatccttttccttgtcggcgctgctaccggcgcccattccttcgaacaagttcagcttcaacagcctggcgctgagctggtcaaacctggcgcttctgtgaagatgagctgcaaagccagcggctacgccttcagcagctactggatcaactggatgaagcagaaacccggccagggactcgaatggatcggccaaatctatcccggcgacggcgacaccaactacaacggcaagttcaagggcagagccacactgaccgccgatacctctagcagcacagcctacatgcagctgagcagcctgaccagcgaagatagcgccgtgtacttctgtgcccggtccatcacaacagtcgtgggctgcgctatggactattggggccagggaacaagcgtgaccgtgtctagtacgcgtatccagaaccctgatcctgccgtgtaccagctgcgggatagcaagagcagcgacaagagcgtgtgtctgttcaccgacttcgacagccagaccaacgtgtcccagagcaaggactccgacgtgtacatcaccgataagtgcgtgctggacatgcggagcatggacttcaagagcaactccgccgtggcctggtccaacaagtccgatttcgcctgcgccaacgccttcaacaacagcattatccccgaggacacattcttcccaagccccgagagcagctgcgacgtgaagctggtggaaaagagcttcgagacagacaccaacctgaacttccagaacctgagcgtgatcggcttcagaatcctgctgctgaaagtggccggctttaacctgctgatgaccctgcggctgtggtccagctaa

SEQ ID NO: 8323 - DNA, 1977 bp, synthetic construct
  source 1..1977: mol_type = other DNA
atggccttaccagtgaccgccttgctcctgccgctggccttgctgctccacgccgccaggccggcatgcgcccgccccgccaagagcgaggacctgtaccccaaccccggtaccggcggaggcggatctggcggcggaggtagcggtggcggaggatctgaattcgacatccagatgacacagagccctagcagcctgtctgccagcgtgggagacagagtgaccatcacatgcaaggccagcgaccacatcaacaactggctggcctggtatcagcagaagcctggacaggcccctaagctgctgatctacggcgctaccacactggaaacaggcgtgcccagcagattttctggcagcggctctggcaccgactacaccctgacaatatccagcctccagcctgaggacttcgccacctactactgtcagcagagctggaacaccccttggacattcggccagggcaccaagctggaaatcaagagactcgaggacctgaagaacgtgttcccacctgaggtggccgtgttcgagcctagcgaggccgagatcagccacacccagaaagccaccctcgtgtgcctggctaccggcttctaccccgaccatgtggaactgtcttggtgggtcaacggcaaagaggtgcacagcggcgtgtgtaccgacccccagccactgaaagaacagcccgccctgaacgacagccggtactgcctgagcagcagactgagagtgtccgccaccttctggcagaacccccggaaccacttcagatgccaggtgcagttctacggcctgagcgagaacgacgagtggacccaggacagagccaagcccgtgacccagatcgtgtctgccgaagcctggggcagagccgattgcggctttaccagcgagagctaccagcagggcgtgctgagcgccaccatcctgtacgagatcctgctgggcaaggccaccctgtacgccgtgctggtgtctgccctggtgctgatggctatggtcaagcggaaggacagccggggaagggccaagcgatctggatctggagcaacaaacttctcactactcaaacaagcaggtgacgtggaggagaatcccgggcctactagtgccaccatggactggatttggcgcatccttttccttgtcggcgctgctaccggcgcccattccttcgaacaagttcagcttcaacagcctggcgctgagctggtcaaacctggcgcttctgtgaagatgagctgcaaagccagcggctacgccttcagcagctactggatcaactggatgaagcagaaacccggccagggactcgaatggatcggccaaatctatcccggcgacggcgacaccaactacaacggcaagttcaagggcagagccacactgaccgccgatacctctagcagcacagcctacatgcagctgagcagcctgaccagcgaagatagcgccgtgtacttctgtgcccggtccatcacaacagtcgtgggctgcgctatggactattggggccagggaacaagcgtgaccgtgtctagtacgcgtatccagaaccctgatcctgccgtgtaccagctgcgggatagcaagagcagcgacaagagcgtgtgtctgttcaccgacttcgacagccagaccaacgtgtcccagagcaaggactccgacgtgtacatcaccgataagtgcgtgctggacatgcggagcatggacttcaagagcaactccgccgtggcctggtccaacaagtccgatttcgcctgcgccaacgccttcaacaacagcattatccccgaggacacattcttcccaagccccgagagcagctgcgacgtgaagctggtggaaaagagcttcgagacagacaccaacctgaacttccagaacctgagcgtgatcggcttcagaatcctgctgctgaaagtggccggctttaacctgctgatgaccctgcggctgtggtccagctaa

SEQ ID NO: 8324 - DNA, 1974 bp, synthetic construct
  source 1..1974: mol_type = other DNA
atggccttaccagtgaccgccttgctcctgccgctggccttgctgctccacgccgccaggccggcatgcgcccgccccgccaagagcgaggacctgtaccccaacggtaccggcggaggcggatctggcggcggaggtagcggtggcggaggatctgaattcgacatccagatgacacagagccctagcagcctgtctgccagcgtgggagacagagtgaccatcacatgcaaggccagcgaccacatcaacaactggctggcctggtatcagcagaagcctggacaggcccctaagctgctgatctacggcgctaccacactggaaacaggcgtgcccagcagattttctggcagcggctctggcaccgactacaccctgacaatatccagcctccagcctgaggacttcgccacctactactgtcagcagagctggaacaccccttggacattcggccagggcaccaagctggaaatcaagagactcgaggacctgaagaacgtgttcccacctgaggtggccgtgttcgagcctagcgaggccgagatcagccacacccagaaagccaccctcgtgtgcctggctaccggcttctaccccgaccatgtggaactgtcttggtgggtcaacggcaaagaggtgcacagcggcgtgtgtaccgacccccagccactgaaagaacagcccgccctgaacgacagccggtactgcctgagcagcagactgagagtgtccgccaccttctggcagaacccccggaaccacttcagatgccaggtgcagttctacggcctgagcgagaacgacgagtggacccaggacagagccaagcccgtgacccagatcgtgtctgccgaagcctggggcagagccgattgcggctttaccagcgagagctaccagcagggcgtgctgagcgccaccatcctgtacgagatcctgctgggcaaggccaccctgtacgccgtgctggtgtctgccctggtgctgatggctatggtcaagcggaaggacagccggggaagggccaagcgatctggatctggagcaacaaacttctcactactcaaacaagcaggtgacgtggaggagaatcccgggcctactagtgccaccatggactggatttggcgcatccttttccttgtcggcgctgctaccggcgcccattccttcgaacaagttcagcttcaacagcctggcgctgagctggtcaaacctggcgcttctgtgaagatgagctgcaaagccagcggctacgccttcagcagctactggatcaactggatgaagcagaaacccggccagggactcgaatggatcggccaaatctatcccggcgacggcgacaccaactacaacggcaagttcaagggcagagccacactgaccgccgatacctctagcagcacagcctacatgcagctgagcagcctgaccagcgaagatagcgccgtgtacttctgtgcccggtccatcacaacagtcgtgggctgcgctatggactattggggccagggaacaagcgtgaccgtgtctagtacgcgtatccagaaccctgatcctgccgtgtaccagctgcgggatagcaagagcagcgacaagagcgtgtgtctgttcaccgacttcgacagccagaccaacgtgtcccagagcaaggactccgacgtgtacatcaccgataagtgcgtgctggacatgcggagcatggacttcaagagcaactccgccgtggcctggtccaacaagtccgatttcgcctgcgccaacgccttcaacaacagcattatccccgaggacacattcttcccaagccccgagagcagctgcgacgtgaagctggtggaaaagagcttcgagacagacaccaacctgaacttccagaacctgagcgtgatcggcttcagaatcctgctgctgaaagtggccggctttaacctgctgatgaccctgcggctgtggtccagctaa

SEQ ID NO: 8325 - DNA, 1971 bp, synthetic construct
  source 1..1971: mol_type = other DNA
atggccttaccagtgaccgccttgctcctgccgctggccttgctgctccacgccgccaggccggcatgcgcccgccccgccaagagcgaggacctgtaccccggtaccggcggaggcggatctggcggcggaggtagcggtggcggaggatctgaattcgacatccagatgacacagagccctagcagcctgtctgccagcgtgggagacagagtgaccatcacatgcaaggccagcgaccacatcaacaactggctggcctggtatcagcagaagcctggacaggcccctaagctgctgatctacggcgctaccacactggaaacaggcgtgcccagcagattttctggcagcggctctggcaccgactacaccctgacaatatccagcctccagcctgaggacttcgccacctactactgtcagcagagctggaacaccccttggacattcggccagggcaccaagctggaaatcaagagactcgaggacctgaagaacgtgttcccacctgaggtggccgtgttcgagcctagcgaggccgagatcagccacacccagaaagccaccctcgtgtgcctggctaccggcttctaccccgaccatgtggaactgtcttggtgggtcaacggcaaagaggtgcacagcggcgtgtgtaccgacccccagccactgaaagaacagcccgccctgaacgacagccggtactgcctgagcagcagactgagagtgtccgccaccttctggcagaacccccggaaccacttcagatgccaggtgcagttctacggcctgagcgagaacgacgagtggacccaggacagagccaagcccgtgacccagatcgtgtctgccgaagcctggggcagagccgattgcggctttaccagcgagagctaccagcagggcgtgctgagcgccaccatcctgtacgagatcctgctgggcaaggccaccctgtacgccgtgctggtgtctgccctggtgctgatggctatggtcaagcggaaggacagccggggaagggccaagcgatctggatctggagcaacaaacttctcactactcaaacaagcaggtgacgtggaggagaatcccgggcctactagtgccaccatggactggatttggcgcatccttttccttgtcggcgctgctaccggcgcccattccttcgaacaagttcagcttcaacagcctggcgctgagctggtcaaacctggcgcttctgtgaagatgagctgcaaagccagcggctacgccttcagcagctactggatcaactggatgaagcagaaacccggccagggactcgaatggatcggccaaatctatcccggcgacggcgacaccaactacaacggcaagttcaagggcagagccacactgaccgccgatacctctagcagcacagcctacatgcagctgagcagcctgaccagcgaagatagcgccgtgtacttctgtgcccggtccatcacaacagtcgtgggctgcgctatggactattggggccagggaacaagcgtgaccgtgtctagtacgcgtatccagaaccctgatcctgccgtgtaccagctgcgggatagcaagagcagcgacaagagcgtgtgtctgttcaccgacttcgacagccagaccaacgtgtcccagagcaaggactccgacgtgtacatcaccgataagtgcgtgctggacatgcggagcatggacttcaagagcaactccgccgtggcctggtccaacaagtccgatttcgcctgcgccaacgccttcaacaacagcattatccccgaggacacattcttcccaagccccgagagcagctgcgacgtgaagctggtggaaaagagcttcgagacagacaccaacctgaacttccagaacctgagcgtgatcggcttcagaatcctgctgctgaaagtggccggctttaacctgctgatgaccctgcggctgtggtccagctaa

SEQ ID NO: 8326 - DNA, 1968 bp, synthetic construct
  source 1..1968: mol_type = other DNA
atggccttaccagtgaccgccttgctcctgccgctggccttgctgctccacgccgccaggccggcatgcgcccgccccgccaagagcgaggacctgtacggtaccggcggaggcggatctggcggcggaggtagcggtggcggaggatctgaattcgacatccagatgacacagagccctagcagcctgtctgccagcgtgggagacagagtgaccatcacatgcaaggccagcgaccacatcaacaactggctggcctggtatcagcagaagcctggacaggcccctaagctgctgatctacggcgctaccacactggaaacaggcgtgcccagcagattttctggcagcggctctggcaccgactacaccctgacaatatccagcctccagcctgaggacttcgccacctactactgtcagcagagctggaacaccccttggacattcggccagggcaccaagctggaaatcaagagactcgaggacctgaagaacgtgttcccacctgaggtggccgtgttcgagcctagcgaggccgagatcagccacacccagaaagccaccctcgtgtgcctggctaccggcttctaccccgaccatgtggaactgtcttggtgggtcaacggcaaagaggtgcacagcggcgtgtgtaccgacccccagccactgaaagaacagcccgccctgaacgacagccggtactgcctgagcagcagactgagagtgtccgccaccttctggcagaacccccggaaccacttcagatgccaggtgcagttctacggcctgagcgagaacgacgagtggacccaggacagagccaagcccgtgacccagatcgtgtctgccgaagcctggggcagagccgattgcggctttaccagcgagagctaccagcagggcgtgctgagcgccaccatcctgtacgagatcctgctgggcaaggccaccctgtacgccgtgctggtgtctgccctggtgctgatggctatggtcaagcggaaggacagccggggaagggccaagcgatctggatctggagcaacaaacttctcactactcaaacaagcaggtgacgtggaggagaatcccgggcctactagtgccaccatggactggatttggcgcatccttttccttgtcggcgctgctaccggcgcccattccttcgaacaagttcagcttcaacagcctggcgctgagctggtcaaacctggcgcttctgtgaagatgagctgcaaagccagcggctacgccttcagcagctactggatcaactggatgaagcagaaacccggccagggactcgaatggatcggccaaatctatcccggcgacggcgacaccaactacaacggcaagttcaagggcagagccacactgaccgccgatacctctagcagcacagcctacatgcagctgagcagcctgaccagcgaagatagcgccgtgtacttctgtgcccggtccatcacaacagtcgtgggctgcgctatggactattggggccagggaacaagcgtgaccgtgtctagtacgcgtatccagaaccctgatcctgccgtgtaccagctgcgggatagcaagagcagcgacaagagcgtgtgtctgttcaccgacttcgacagccagaccaacgtgtcccagagcaaggactccgacgtgtacatcaccgataagtgcgtgctggacatgcggagcatggacttcaagagcaactccgccgtggcctggtccaacaagtccgatttcgcctgcgccaacgccttcaacaacagcattatccccgaggacacattcttcccaagccccgagagcagctgcgacgtgaagctggtggaaaagagcttcgagacagacaccaacctgaacttccagaacctgagcgtgatcggcttcagaatcctgctgctgaaagtggccggctttaacctgctgatgaccctgcggctgtggtccagctaa

SEQ ID NO: 8327 - DNA, 1965 bp, synthetic construct
  source 1..1965: mol_type = other DNA
atggccttaccagtgaccgccttgctcctgccgctggccttgctgctccacgccgccaggccggcatgccgccccgccaagagcgaggacctgtacggtaccggcggaggcggatctggcggcggaggtagcggtggcggaggatctgaattcgacatccagatgacacagagccctagcagcctgtctgccagcgtgggagacagagtgaccatcacatgcaaggccagcgaccacatcaacaactggctggcctggtatcagcagaagcctggacaggcccctaagctgctgatctacggcgctaccacactggaaacaggcgtgcccagcagattttctggcagcggctctggcaccgactacaccctgacaatatccagcctccagcctgaggacttcgccacctactactgtcagcagagctggaacaccccttggacattcggccagggcaccaagctggaaatcaagagactcgaggacctgaagaacgtgttcccacctgaggtggccgtgttcgagcctagcgaggccgagatcagccacacccagaaagccaccctcgtgtgcctggctaccggcttctaccccgaccatgtggaactgtcttggtgggtcaacggcaaagaggtgcacagcggcgtgtgtaccgacccccagccactgaaagaacagcccgccctgaacgacagccggtactgcctgagcagcagactgagagtgtccgccaccttctggcagaacccccggaaccacttcagatgccaggtgcagttctacggcctgagcgagaacgacgagtggacccaggacagagccaagcccgtgacccagatcgtgtctgccgaagcctggggcagagccgattgcggctttaccagcgagagctaccagcagggcgtgctgagcgccaccatcctgtacgagatcctgctgggcaaggccaccctgtacgccgtgctggtgtctgccctggtgctgatggctatggtcaagcggaaggacagccggggaagggccaagcgatctggatctggagcaacaaacttctcactactcaaacaagcaggtgacgtggaggagaatcccgggcctactagtgccaccatggactggatttggcgcatccttttccttgtcggcgctgctaccggcgcccattccttcgaacaagttcagcttcaacagcctggcgctgagctggtcaaacctggcgcttctgtgaagatgagctgcaaagccagcggctacgccttcagcagctactggatcaactggatgaagcagaaacccggccagggactcgaatggatcggccaaatctatcccggcgacggcgacaccaactacaacggcaagttcaagggcagagccacactgaccgccgatacctctagcagcacagcctacatgcagctgagcagcctgaccagcgaagatagcgccgtgtacttctgtgcccggtccatcacaacagtcgtgggctgcgctatggactattggggccagggaacaagcgtgaccgtgtctagtacgcgtatccagaaccctgatcctgccgtgtaccagctgcgggatagcaagagcagcgacaagagcgtgtgtctgttcaccgacttcgacagccagaccaacgtgtcccagagcaaggactccgacgtgtacatcaccgataagtgcgtgctggacatgcggagcatggacttcaagagcaactccgccgtggcctggtccaacaagtccgatttcgcctgcgccaacgccttcaacaacagcattatccccgaggacacattcttcccaagccccgagagcagctgcgacgtgaagctggtggaaaagagcttcgagacagacaccaacctgaacttccagaacctgagcgtgatcggcttcagaatcctgctgctgaaagtggccggctttaacctgctgatgaccctgcggctgtggtccagctaa

SEQ ID NO: 8328 - DNA, 1962 bp, synthetic construct
  source 1..1962: mol_type = other DNA
atggccttaccagtgaccgccttgctcctgccgctggccttgctgctccacgccgccaggccggcatgccccgccaagagcgaggacctgtacggtaccggcggaggcggatctggcggcggaggtagcggtggcggaggatctgaattcgacatccagatgacacagagccctagcagcctgtctgccagcgtgggagacagagtgaccatcacatgcaaggccagcgaccacatcaacaactggctggcctggtatcagcagaagcctggacaggcccctaagctgctgatctacggcgctaccacactggaaacaggcgtgcccagcagattttctggcagcggctctggcaccgactacaccctgacaatatccagcctccagcctgaggacttcgccacctactactgtcagcagagctggaacaccccttggacattcggccagggcaccaagctggaaatcaagagactcgaggacctgaagaacgtgttcccacctgaggtggccgtgttcgagcctagcgaggccgagatcagccacacccagaaagccaccctcgtgtgcctggctaccggcttctaccccgaccatgtggaactgtcttggtgggtcaacggcaaagaggtgcacagcggcgtgtgtaccgacccccagccactgaaagaacagcccgccctgaacgacagccggtactgcctgagcagcagactgagagtgtccgccaccttctggcagaacccccggaaccacttcagatgccaggtgcagttctacggcctgagcgagaacgacgagtggacccaggacagagccaagcccgtgacccagatcgtgtctgccgaagcctggggcagagccgattgcggctttaccagcgagagctaccagcagggcgtgctgagcgccaccatcctgtacgagatcctgctgggcaaggccaccctgtacgccgtgctggtgtctgccctggtgctgatggctatggtcaagcggaaggacagccggggaagggccaagcgatctggatctggagcaacaaacttctcactactcaaacaagcaggtgacgtggaggagaatcccgggcctactagtgccaccatggactggatttggcgcatccttttccttgtcggcgctgctaccggcgcccattccttcgaacaagttcagcttcaacagcctggcgctgagctggtcaaacctggcgcttctgtgaagatgagctgcaaagccagcggctacgccttcagcagctactggatcaactggatgaagcagaaacccggccagggactcgaatggatcggccaaatctatcccggcgacggcgacaccaactacaacggcaagttcaagggcagagccacactgaccgccgatacctctagcagcacagcctacatgcagctgagcagcctgaccagcgaagatagcgccgtgtacttctgtgcccggtccatcacaacagtcgtgggctgcgctatggactattggggccagggaacaagcgtgaccgtgtctagtacgcgtatccagaaccctgatcctgccgtgtaccagctgcgggatagcaagagcagcgacaagagcgtgtgtctgttcaccgacttcgacagccagaccaacgtgtcccagagcaaggactccgacgtgtacatcaccgataagtgcgtgctggacatgcggagcatggacttcaagagcaactccgccgtggcctggtccaacaagtccgatttcgcctgcgccaacgccttcaacaacagcattatccccgaggacacattcttcccaagccccgagagcagctgcgacgtgaagctggtggaaaagagcttcgagacagacaccaacctgaacttccagaacctgagcgtgatcggcttcagaatcctgctgctgaaagtggccggctttaacctgctgatgaccctgcggctgtggtccagctaa

SEQ ID NO: 8329 - DNA, 1959 bp, synthetic construct; identical to SEQ ID NO: 8319
  source 1..1959: mol_type = other DNA

SEQ ID NO: 8330 - DNA, 1971 bp, synthetic construct
  source 1..1971: mol_type = other DNA
atggccttaccagtgaccgccttgctcctgccgctggccttgctgctccacgccgccaggccggcatgcgccaagagcgaggacctgtaccccaaccccaagggtaccggcggaggcggatctggcggcggaggtagcggtggcggaggatctgaattcgacatccagatgacacagagccctagcagcctgtctgccagcgtgggagacagagtgaccatcacatgcaaggccagcgaccacatcaacaactggctggcctggtatcagcagaagcctggacaggcccctaagctgctgatctacggcgctaccacactggaaacaggcgtgcccagcagattttctggcagcggctctggcaccgactacaccctgacaatatccagcctccagcctgaggacttcgccacctactactgtcagcagagctggaacaccccttggacattcggccagggcaccaagctggaaatcaagagactcgaggacctgaagaacgtgttcccacctgaggtggccgtgttcgagcctagcgaggccgagatcagccacacccagaaagccaccctcgtgtgcctggctaccggcttctaccccgaccatgtggaactgtcttggtgggtcaacggcaaagaggtgcacagcggcgtgtgtaccgacccccagccactgaaagaacagcccgccctgaacgacagccggtactgcctgagcagcagactgagagtgtccgccaccttctggcagaacccccggaaccacttcagatgccaggtgcagttctacggcctgagcgagaacgacgagtggacccaggacagagccaagcccgtgacccagatcgtgtctgccgaagcctggggcagagccgattgcggctttaccagcgagagctaccagcagggcgtgctgagcgccaccatcctgtacgagatcctgctgggcaaggccaccctgtacgccgtgctggtgtctgccctggtgctgatggctatggtcaagcggaaggacagccggggaagggccaagcgatctggatctggagcaacaaacttctcactactcaaacaagcaggtgacgtggaggagaatcccgggcctactagtgccaccatggactggatttggcgcatccttttccttgtcggcgctgctaccggcgcccattccttcgaacaagttcagcttcaacagcctggcgctgagctggtcaaacctggcgcttctgtgaagatgagctgcaaagccagcggctacgccttcagcagctactggatcaactggatgaagcagaaacccggccagggactcgaatggatcggccaaatctatcccggcgacggcgacaccaactacaacggcaagttcaagggcagagccacactgaccgccgatacctctagcagcacagcctacatgcagctgagcagcctgaccagcgaagatagcgccgtgtacttctgtgcccggtccatcacaacagtcgtgggctgcgctatggactattggggccagggaacaagcgtgaccgtgtctagtacgcgtatccagaaccctgatcctgccgtgtaccagctgcgggatagcaagagcagcgacaagagcgtgtgtctgttcaccgacttcgacagccagaccaacgtgtcccagagcaaggactccgacgtgtacatcaccgataagtgcgtgctggacatgcggagcatggacttcaagagcaactccgccgtggcctggtccaacaagtccgatttcgcctgcgccaacgccttcaacaacagcattatccccgaggacacattcttcccaagccccgagagcagctgcgacgtgaagctggtggaaaagagcttcgagacagacaccaacctgaacttccagaacctgagcgtgatcggcttcagaatcctgctgctgaaagtggccggctttaacctgctgatgaccctgcggctgtggtccagctaa

SEQ ID NO: 8331 - DNA, 1968 bp, synthetic construct
  source 1..1968: mol_type = other DNA
atggccttaccagtgaccgccttgctcctgccgctggccttgctgctccacgccgccaggccggcatgcgccaagagcgaggacctgtaccccaaccccggtaccggcggaggcggatctggcggcggaggtagcggtggcggaggatctgaattcgacatccagatgacacagagccctagcagcctgtctgccagcgtgggagacagagtgaccatcacatgcaaggccagcgaccacatcaacaactggctggcctggtatcagcagaagcctggacaggcccctaagctgctgatctacggcgctaccacactggaaacaggcgtgcccagcagattttctggcagcggctctggcaccgactacaccctgacaatatccagcctccagcctgaggacttcgccacctactactgtcagcagagctggaacaccccttggacattcggccagggcaccaagctggaaatcaagagactcgaggacctgaagaacgtgttcccacctgaggtggccgtgttcgagcctagcgaggccgagatcagccacacccagaaagccaccctcgtgtgcctggctaccggcttctaccccgaccatgtggaactgtcttggtgggtcaacggcaaagaggtgcacagcggcgtgtgtaccgacccccagccactgaaagaacagcccgccctgaacgacagccggtactgcctgagcagcagactgagagtgtccgccaccttctggcagaacccccggaaccacttcagatgccaggtgcagttctacggcctgagcgagaacgacgagtggacccaggacagagccaagcccgtgacccagatcgtgtctgccgaagcctggggcagagccgattgcggctttaccagcgagagctaccagcagggcgtgctgagcgccaccatcctgtacgagatcctgctgggcaaggccaccctgtacgccgtgctggtgtctgccctggtgctgatggctatggtcaagcggaaggacagccggggaagggccaagcgatctggatctggagcaacaaacttctcactactcaaacaagcaggtgacgtggaggagaatcccgggcctactagtgccaccatggactggatttggcgcatccttttccttgtcggcgctgctaccggcgcccattccttcgaacaagttcagcttcaacagcctggcgctgagctggtcaaacctggcgcttctgtgaagatgagctgcaaagccagcggctacgccttcagcagctactggatcaactggatgaagcagaaacccggccagggactcgaatggatcggccaaatctatcccggcgacggcgacaccaactacaacggcaagttcaagggcagagccacactgaccgccgatacctctagcagcacagcctacatgcagctgagcagcctgaccagcgaagatagcgccgtgtacttctgtgcccggtccatcacaacagtcgtgggctgcgctatggactattggggccagggaacaagcgtgaccgtgtctagtacgcgtatccagaaccctgatcctgccgtgtaccagctgcgggatagcaagagcagcgacaagagcgtgtgtctgttcaccgacttcgacagccagaccaacgtgtcccagagcaaggactccgacgtgtacatcaccgataagtgcgtgctggacatgcggagcatggacttcaagagcaactccgccgtggcctggtccaacaagtccgatttcgcctgcgccaacgccttcaacaacagcattatccccgaggacacattcttcccaagccccgagagcagctgcgacgtgaagctggtggaaaagagcttcgagacagacaccaacctgaacttccagaacctgagcgtgatcggcttcagaatcctgctgctgaaagtggccggctttaacctgctgatgaccctgcggctgtggtccagctaa

SEQ ID NO: 8332 - DNA, 1965 bp, synthetic construct
  source 1..1965: mol_type = other DNA
atggccttaccagtgaccgccttgctcctgccgctggccttgctgctccacgccgccaggccggcatgcgccaagagcgaggacctgtaccccaacggtaccggcggaggcggatctggcggcggaggtagcggtggcggaggatctgaattcgacatccagatgacacagagccctagcagcctgtctgccagcgtgggagacagagtgaccatcacatgcaaggccagcgaccacatcaacaactggctggcctggtatcagcagaagcctggacaggcccctaagctgctgatctacggcgctaccacactggaaacaggcgtgcccagcagattttctggcagcggctctggcaccgactacaccctgacaatatccagcctccagcctgaggacttcgccacctactactgtcagcagagctggaacaccccttggacattcggccagggcaccaagctggaaatcaagagactcgaggacctgaagaacgtgttcccacctgaggtggccgtgttcgagcctagcgaggccgagatcagccacacccagaaagccaccctcgtgtgcctggctaccggcttctaccccgaccatgtggaactgtcttggtgggtcaacggcaaagaggtgcacagcggcgtgtgtaccgacccccagccactgaaagaacagcccgccctgaacgacagccggtactgcctgagcagcagactgagagtgtccgccaccttctggcagaacccccggaaccacttcagatgccaggtgcagttctacggcctgagcgagaacgacgagtggacccaggacagagccaagcccgtgacccagatcgtgtctgccgaagcctggggcagagccgattgcggctttaccagcgagagctaccagcagggcgtgctgagcgccaccatcctgtacgagatcctgctgggcaaggccaccctgtacgccgtgctggtgtctgccctggtgctgatggctatggtcaagcggaaggacagccggggaagggccaagcgatctggatctggagcaacaaacttctcactactcaaacaagcaggtgacgtggaggagaatcccgggcctactagtgccaccatggactggatttggcgcatccttttccttgtcggcgctgctaccggcgcccattccttcgaacaagttcagcttcaacagcctggcgctgagctggtcaaacctggcgcttctgtgaagatgagctgcaaagccagcggctacgccttcagcagctactggatcaactggatgaagcagaaacccggccagggactcgaatggatcggccaaatctatcccggcgacggcgacaccaactacaacggcaagttcaagggcagagccacactgaccgccgatacctctagcagcacagcctacatgcagctgagcagcctgaccagcgaagatagcgccgtgtacttctgtgcccggtccatcacaacagtcgtgggctgcgctatggactattggggccagggaacaagcgtgaccgtgtctagtacgcgtatccagaaccctgatcctgccgtgtaccagctgcgggatagcaagagcagcgacaagagcgtgtgtctgttcaccgacttcgacagccagaccaacgtgtcccagagcaaggactccgacgtgtacatcaccgataagtgcgtgctggacatgcggagcatggacttcaagagcaactccgccgtggcctggtccaacaagtccgatttcgcctgcgccaacgccttcaacaacagcattatccccgaggacacattcttcccaagccccgagagcagctgcgacgtgaagctggtggaaaagagcttcgagacagacaccaacctgaacttccagaacctgagcgtgatcggcttcagaatcctgctgctgaaagtggccggctttaacctgctgatgaccctgcggctgtggtccagctaa

SEQ ID NO: 8333 - DNA, 1962 bp, synthetic construct
  source 1..1962: mol_type = other DNA
atggccttaccagtgaccgccttgctcctgccgctggccttgctgctccacgccgccaggccggcatgcgccaagagcgaggacctgtaccccggtaccggcggaggcggatctggcggcggaggtagcggtggcggaggatctgaattcgacatccagatgacacagagccctagcagcctgtctgccagcgtgggagacagagtgaccatcacatgcaaggccagcgaccacatcaacaactggctggcctggtatcagcagaagcctggacaggcccctaagctgctgatctacggcgctaccacactggaaacaggcgtgcccagcagattttctggcagcggctctggcaccgactacaccctgacaatatccagcctccagcctgaggacttcgccacctactactgtcagcagagctggaacaccccttggacattcggccagggcaccaagctggaaatcaagagactcgaggacctgaagaacgtgttcccacctgaggtggccgtgttcgagcctagcgaggccgagatcagccacacccagaaagccaccctcgtgtgcctggctaccggcttctaccccgaccatgtggaactgtcttggtgggtcaacggcaaagaggtgcacagcggcgtgtgtaccgacccccagccactgaaagaacagcccgccctgaacgacagccggtactgcctgagcagcagactgagagtgtccgccaccttctggcagaacccccggaaccacttcagatgccaggtgcagttctacggcctgagcgagaacgacgagtggacccaggacagagccaagcccgtgacccagatcgtgtctgccgaagcctggggcagagccgattgcggctttaccagcgagagctaccagcagggcgtgctgagcgccaccatcctgtacgagatcctgctgggcaaggccaccctgtacgccgtgctggtgtctgccctggtgctgatggctatggtcaagcggaaggacagccggggaagggccaagcgatctggatctggagcaacaaacttctcactactcaaacaagcaggtgacgtggaggagaatcccgggcctactagtgccaccatggactggatttggcgcatccttttccttgtcggcgctgctaccggcgcccattccttcgaacaagttcagcttcaacagcctggcgctgagctggtcaaacctggcgcttctgtgaagatgagctgcaaagccagcggctacgccttcagcagctactggatcaactggatgaagcagaaacccggccagggactcgaatggatcggccaaatctatcccggcgacggcgacaccaactacaacggcaagttcaagggcagagccacactgaccgccgatacctctagcagcacagcctacatgcagctgagcagcctgaccagcgaagatagcgccgtgtacttctgtgcccggtccatcacaacagtcgtgggctgcgctatggactattggggccagggaacaagcgtgaccgtgtctagtacgcgtatccagaaccctgatcctgccgtgtaccagctgcgggatagcaagagcagcgacaagagcgtgtgtctgttcaccgacttcgacagccagaccaacgtgtcccagagcaaggactccgacgtgtacatcaccgataagtgcgtgctggacatgcggagcatggacttcaagagcaactccgccgtggcctggtccaacaagtccgatttcgcctgcgccaacgccttcaacaacagcattatccccgaggacacattcttcccaagccccgagagcagctgcgacgtgaagctggtggaaaagagcttcgagacagacaccaacctgaacttccagaacctgagcgtgatcggcttcagaatcctgctgctgaaagtggccggctttaacctgctgatgaccctgcggctgtggtccagctaa

SEQ ID NO: 8334 - DNA, 1959 bp, synthetic construct; identical to SEQ ID NO: 8319
  source 1..1959: mol_type = other DNA

SEQ ID NO: 8335 - DNA, 1968 bp, synthetic construct
  source 1..1968: mol_type = other DNA
atggccttaccagtgaccgccttgctcctgccgctggccttgctgctccacgccgccaggccggcatgcaagagcgaggacctgtaccccaaccccaagggtaccggcggaggcggatctggcggcggaggtagcggtggcggaggatctgaattcgacatccagatgacacagagccctagcagcctgtctgccagcgtgggagacagagtgaccatcacatgcaaggccagcgaccacatcaacaactggctggcctggtatcagcagaagcctggacaggcccctaagctgctgatctacggcgctaccacactggaaacaggcgtgcccagcagattttctggcagcggctctggcaccgactacaccctgacaatatccagcctccagcctgaggacttcgccacctactactgtcagcagagctggaacaccccttggacattcggccagggcaccaagctggaaatcaagagactcgaggacctgaagaacgtgttcccacctgaggtggccgtgttcgagcctagcgaggccgagatcagccacacccagaaagccaccctcgtgtgcctggctaccggcttctaccccgaccatgtggaactgtcttggtgggtcaacggcaaagaggtgcacagcggcgtgtgtaccgacccccagccactgaaagaacagcccgccctgaacgacagccggtactgcctgagcagcagactgagagtgtccgccaccttctggcagaacccccggaaccacttcagatgccaggtgcagttctacggcctgagcgagaacgacgagtggacccaggacagagccaagcccgtgacccagatcgtgtctgccgaagcctggggcagagccgattgcggctttaccagcgagagctaccagcagggcgtgctgagcgccaccatcctgtacgagatcctgctgggcaaggccaccctgtacgccgtgctggtgtctgccctggtgctgatggctatggtcaagcggaaggacagccggggaagggccaagcgatctggatctggagcaacaaacttctcactactcaaacaagcaggtgacgtggaggagaatcccgggcctactagtgccaccatggactggatttggcgcatccttttccttgtcggcgctgctaccggcgcccattccttcgaacaagttcagcttcaacagcctggcgctgagctggtcaaacctggcgcttctgtgaagatgagctgcaaagccagcggctacgccttcagcagctactggatcaactggatgaagcagaaacccggccagggactcgaatggatcggccaaatctatcccggcgacggcgacaccaactacaacggcaagttcaagggcagagccacactgaccgccgatacctctagcagcacagcctacatgcagctgagcagcctgaccagcgaagatagcgccgtgtacttctgtgcccggtccatcacaacagtcgtgggctgcgctatggactattggggccagggaacaagcgtgaccgtgtctagtacgcgtatccagaaccctgatcctgccgtgtaccagctgcgggatagcaagagcagcgacaagagcgtgtgtctgttcaccgacttcgacagccagaccaacgtgtcccagagcaaggactccgacgtgtacatcaccgataagtgcgtgctggacatgcggagcatggacttcaagagcaactccgccgtggcctggtccaacaagtccgatttcgcctgcgccaacgccttcaacaacagcattatccccgaggacacattcttcccaagccccgagagcagctgcgacgtgaagctggtggaaaagagcttcgagacagacaccaacctgaacttccagaacctgagcgtgatcggcttcagaatcctgctgctgaaagtggccggctttaacctgctgatgaccctgcggctgtggtccagctaa

SEQ ID NO: 8336 - DNA, 1965 bp, synthetic construct
  source 1..1965: mol_type = other DNA
atggccttaccagtgaccgccttgctcctgccgctggccttgctgctccacgccgccaggccggcatgcaagagcgaggacctgtaccccaaccccggtaccggcggaggcggatctggcggcggaggtagcggtggcggaggatctgaattcgacatccagatgacacagagccctagcagcctgtctgccagcgtgggagacagagtgaccatcacatgcaaggccagcgaccacatcaacaactggctggcctggtatcagcagaagcctggacaggcccctaagctgctgatctacggcgctaccacactggaaacaggcgtgcccagcagattttctggcagcggctctggcaccgactacaccctgacaatatccagcctccagcctgaggacttcgccacctactactgtcagcagagctggaacaccccttggacattcggccagggcaccaagctggaaatcaagagactcgaggacctgaagaacgtgttcccacctgaggtggccgtgttcgagcctagcgaggccgagatcagccacacccagaaagccaccctcgtgtgcctggctaccggcttctaccccgaccatgtggaactgtcttggtgggtcaacggcaaagaggtgcacagcggcgtgtgtaccgacccccagccactgaaagaacagcccgccctgaacgacagccggtactgcctgagcagcagactgagagtgtccgccaccttctggcagaacccccggaaccacttcagatgccaggtgcagttctacggcctgagcgagaacgacgagtggacccaggacagagccaagcccgtgacccagatcgtgtctgccgaagcctggggcagagccgattgcggctttaccagcgagagctaccagcagggcgtgctgagcgccaccatcctgtacgagatcctgctgggcaaggccaccctgtacgccgtgctggtgtctgccctggtgctgatggctatggtcaagcggaaggacagccggggaagggccaagcgatctggatctggagcaacaaacttctcactactcaaacaagcaggtgacgtggaggagaatcccgggcctactagtgccaccatggactggatttggcgcatccttttccttgtcggcgctgctaccggcgcccattccttcgaacaagttcagcttcaacagcctggcgctgagctggtcaaacctggcgcttctgtgaagatgagctgcaaagccagcggctacgccttcagcagctactggatcaactggatgaagcagaaacccggccagggactcgaatggatcggccaaatctatcccggcgacggcgacaccaactacaacggcaagttcaagggcagagccacactgaccgccgatacctctagcagcacagcctacatgcagctgagcagcctgaccagcgaagatagcgccgtgtacttctgtgcccggtccatcacaacagtcgtgggctgcgctatggactattggggccagggaacaagcgtgaccgtgtctagtacgcgtatccagaaccctgatcctgccgtgtaccagctgcgggatagcaagagcagcgacaagagcgtgtgtctgttcaccgacttcgacagccagaccaacgtgtcccagagcaaggactccgacgtgtacatcaccgataagtgcgtgctggacatgcggagcatggacttcaagagcaactccgccgtggcctggtccaacaagtccgatttcgcctgcgccaacgccttcaacaacagcattatccccgaggacacattcttcccaagccccgagagcagctgcgacgtgaagctggtggaaaagagcttcgagacagacaccaacctgaacttccagaacctgagcgtgatcggcttcagaatcctgctgctgaaagtggccggctttaacctgctgatgaccctgcggctgtggtccagctaa

SEQ ID NO: 8337 - DNA, 1962 bp, synthetic construct
  source 1..1962: mol_type = other DNA
atggccttaccagtgaccgccttgctcctgccgctggccttgctgctccacgccgccaggccggcatgcaagagcgaggacctgtaccccaacggtaccggcggaggcggatctggcggcggaggtagcggtggcggaggatctgaattcgacatccagatgacacagagccctagcagcctgtctgccagcgtgggagacagagtgaccatcacatgcaaggccagcgaccacatcaacaactggctggcctggtatcagcagaagcctggacaggcccctaagctgctgatctacggcgctaccacactggaaacaggcgtgcccagcagattttctggcagcggctctggcaccgactacaccctgacaatatccagcctccagcctgaggacttcgccacctactactgtcagcagagctggaacaccccttggacattcggccagggcaccaagctggaaatcaagagactcgaggacctgaagaacgtgttcccacctgaggtggccgtgttcgagcctagcgaggccgagatcagccacacccagaaagccaccctcgtgtgcctggctaccggcttctaccccgaccatgtggaactgtcttggtgggtcaacggcaaagaggtgcacagcggcgtgtgtaccgacccccagccactgaaagaacagcccgccctgaacgacagccggtactgcctgagcagcagactgagagtgtccgccaccttctggcagaacccccggaaccacttcagatgccaggtgcagttctacggcctgagcgagaacgacgagtggacccaggacagagccaagcccgtgacccagatcgtgtctgccgaagcctggggcagagccgattgcggctttaccagcgagagctaccagcagggcgtgctgagcgccaccatcctgtacgagatcctgctgggcaaggccaccctgtacgccgtgctggtgtctgccctggtgctgatggctatggtcaagcggaaggacagccggggaagggccaagcgatctggatctggagcaacaaacttctcactactcaaacaagcaggtgacgtggaggagaatcccgggcctactagtgccaccatggactggatttggcgcatccttttccttgtcggcgctgctaccggcgcccattccttcgaacaagttcagcttcaacagcctggcgctgagctggtcaaacctggcgcttctgtgaagatgagctgcaaagccagcggctacgccttcagcagctactggatcaactggatgaagcagaaacccggccagggactcgaatggatcggccaaatctatcccggcgacggcgacaccaactacaacggcaagttcaagggcagagccacactgaccgccgatacctctagcagcacagcctacatgcagctgagcagcctgaccagcgaagatagcgccgtgtacttctgtgcccggtccatcacaacagtcgtgggctgcgctatggactattggggccagggaacaagcgtgaccgtgtctagtacgcgtatccagaaccctgatcctgccgtgtaccagctgcgggatagcaagagcagcgacaagagcgtgtgtctgttcaccgacttcgacagccagaccaacgtgtcccagagcaaggactccgacgtgtacatcaccgataagtgcgtgctggacatgcggagcatggacttcaagagcaactccgccgtggcctggtccaacaagtccgatttcgcctgcgccaacgccttcaacaacagcattatccccgaggacacattcttcccaagccccgagagcagctgcgacgtgaagctggtggaaaagagcttcgagacagacaccaacctgaacttccagaacctgagcgtgatcggcttcagaatcctgctgctgaaagtggccggctttaacctgctgatgaccctgcggctgtggtccagctaa

SEQ ID NO: 8338 - DNA, 1959 bp, synthetic construct
  source 1..1959: mol_type = other DNA
atggccttaccagtgaccgccttgctcctgccgctggccttgctgctccacgccgccaggccggcatgcaagagcgaggacctgtaccccggtaccggcggaggcggatctggcggcggaggtagcggtggcggaggatctgaattcgacatccagatgacacagagccctagcagcctgtctgccagcgtgggagacagagtgaccatcacatgcaaggccagcgaccacatcaacaactggctggcctggtatcagcagaagcctggacaggcccctaagctgctgatctacggcgctaccacactggaaacaggcgtgcccagcagattttctggcagcggctctggcaccgactacaccctgacaatatccagcctccagcctgaggacttcgccacctactactgtcagcagagctggaacaccccttggacattcggccagggcaccaagctggaaatcaagagactcgaggacctgaagaacgtgttcccacctgaggtggccgtgttcgagcctagcgaggccgagatcagccacacccagaaagccaccctcgtgtgcctggctaccggcttctaccccgaccatgtggaactgtcttggtgggtcaacggcaaagaggtgcacagcggcgtgtgtaccgacccccagccactgaaagaacagcccgccctgaacgacagccggtactgcctgagcagcagactgagagtgtccgccaccttctggcagaacccccggaaccacttcagatgccaggtgcagttctacggcctgagcgagaacgacgagtggacccaggacagagccaagcccgtgacccagatcgtgtctgccgaagcctggggcagagccgattgcggctttaccagcgagagctaccagcagggcgtgctgagcgccaccatcctgtacgagatcctgctgggcaaggccaccctgtacgccgtgctggtgtctgccctggtgctgatggctatggtcaagcggaaggacagccggggaagggccaagcgatctggatctggagcaacaaacttctcactactcaaacaagcaggtgacgtggaggagaatcccgggcctactagtgccaccatggactggatttggcgcatccttttccttgtcggcgctgctaccggcgcccattccttcgaacaagttcagcttcaacagcctggcgctgagctggtcaaacctggcgcttctgtgaagatgagctgcaaagccagcggctacgccttcagcagctactggatcaactggatgaagcagaaacccggccagggactcgaatggatcggccaaatctatcccggcgacggcgacaccaactacaacggcaagttcaagggcagagccacactgaccgccgatacctctagcagcacagcctacatgcagctgagcagcctgaccagcgaagatagcgccgtgtacttctgtgcccggtccatcacaacagtcgtgggctgcgctatggactattggggccagggaacaagcgtgaccgtgtctagtacgcgtatccagaaccctgatcctgccgtgtaccagctgcgggatagcaagagcagcgacaagagcgtgtgtctgttcaccgacttcgacagccagaccaacgtgtcccagagcaaggactccgacgtgtacatcaccgataagtgcgtgctggacatgcggagcatggacttcaagagcaactccgccgtggcctggtccaacaagtccgatttcgcctgcgccaacgccttcaacaacagcattatccccgaggacacattcttcccaagccccgagagcagctgcgacgtgaagctggtggaaaagagcttcgagacagacaccaacctgaacttccagaacctgagcgtgatcggcttcagaatcctgctgctgaaagtggccggctttaacctgctgatgaccctgcggctgtggtccagctaa

SEQ ID NO: 8339 - DNA, 1956 bp, synthetic construct
  source 1..1956: mol_type = other DNA
atggccttaccagtgaccgccttgctcctgccgctggccttgctgctccacgccgccaggccggcatgcaagagcgaggacctgtacggtaccggcggaggcggatctggcggcggaggtagcggtggcggaggatctgaattcgacatccagatgacacagagccctagcagcctgtctgccagcgtgggagacagagtgaccatcacatgcaaggccagcgaccacatcaacaactggctggcctggtatcagcagaagcctggacaggcccctaagctgctgatctacggcgctaccacactggaaacaggcgtgcccagcagattttctggcagcggctctggcaccgactacaccctgacaatatccagcctccagcctgaggacttcgccacctactactgtcagcagagctggaacaccccttggacattcggccagggcaccaagctggaaatcaagagactcgaggacctgaagaacgtgttcccacctgaggtggccgtgttcgagcctagcgaggccgagatcagccacacccagaaagccaccctcgtgtgcctggctaccggcttctaccccgaccatgtggaactgtcttggtgggtcaacggcaaagaggtgcacagcggcgtgtgtaccgacccccagccactgaaagaacagcccgccctgaacgacagccggtactgcctgagcagcagactgagagtgtccgccaccttctggcagaacccccggaaccacttcagatgccaggtgcagttctacggcctgagcgagaacgacgagtggacccaggacagagccaagcccgtgacccagatcgtgtctgccgaagcctggggcagagccgattgcggctttaccagcgagagctaccagcagggcgtgctgagcgccaccatcctgtacgagatcctgctgggcaaggccaccctgtacgccgtgctggtgtctgccctggtgctgatggctatggtcaagcggaaggacagccggggaagggccaagcgatctggatctggagcaacaaacttctcactactcaaacaagcaggtgacgtggaggagaatcccgggcctactagtgccaccatggactggatttggcgcatccttttccttgtcggcgctgctaccggcgcccattccttcgaacaagttcagcttcaacagcctggcgctgagctggtcaaacctggcgcttctgtgaagatgagctgcaaagccagcggctacgccttcagcagctactggatcaactggatgaagcagaaacccggccagggactcgaatggatcggccaaatctatcccggcgacggcgacaccaactacaacggcaagttcaagggcagagccacactgaccgccgatacctctagcagcacagcctacatgcagctgagcagcctgaccagcgaagatagcgccgtgtacttctgtgcccggtccatcacaacagtcgtgggctgcgctatggactattggggccagggaacaagcgtgaccgtgtctagtacgcgtatccagaaccctgatcctgccgtgtaccagctgcgggatagcaagagcagcgacaagagcgtgtgtctgttcaccgacttcgacagccagaccaacgtgtcccagagcaaggactccgacgtgtacatcaccgataagtgcgtgctggacatgcggagcatggacttcaagagcaactccgccgtggcctggtccaacaagtccgatttcgcctgcgccaacgccttcaacaacagcattatccccgaggacacattcttcccaagccccgagagcagctgcgacgtgaagctggtggaaaagagcttcgagacagacaccaacctgaacttccagaacctgagcgtgatcggcttcagaatcctgctgctgaaagtggccggctttaacctgctgatgaccctgcggctgtggtccagctaa

SEQ ID NO: 8340 - DNA, 1971 bp, synthetic construct
  source 1..1971: mol_type = other DNA
atggccttaccagtgaccgccttgctcctgccgctggccttgctgctccacgccgccaggccggcatgccaggccgccgccgagaccctgagcgaggtggccggtaccggcggaggcggatctggcggcggaggtagcggtggcggaggatctgaattcgacatccagatgacacagagccctagcagcctgtctgccagcgtgggagacagagtgaccatcacatgcaaggccagcgaccacatcaacaactggctggcctggtatcagcagaagcctggacaggcccctaagctgctgatctacggcgctaccacactggaaacaggcgtgcccagcagattttctggcagcggctctggcaccgactacaccctgacaatatccagcctccagcctgaggacttcgccacctactactgtcagcagagctggaacaccccttggacattcggccagggcaccaagctggaaatcaagagactcgaggacctgaagaacgtgttcccacctgaggtggccgtgttcgagcctagcgaggccgagatcagccacacccagaaagccaccctcgtgtgcctggctaccggcttctaccccgaccatgtggaactgtcttggtgggtcaacggcaaagaggtgcacagcggcgtgtgtaccgacccccagccactgaaagaacagcccgccctgaacgacagccggtactgcctgagcagcagactgagagtgtccgccaccttctggcagaacccccggaaccacttcagatgccaggtgcagttctacggcctgagcgagaacgacgagtggacccaggacagagccaagcccgtgacccagatcgtgtctgccgaagcctggggcagagccgattgcggctttaccagcgagagctaccagcagggcgtgctgagcgccaccatcctgtacgagatcctgctgggcaaggccaccctgtacgccgtgctggtgtctgccctggtgctgatggctatggtcaagcggaaggacagccggggaagggccaagcgatctggatctggagcaacaaacttctcactactcaaacaagcaggtgacgtggaggagaatcccgggcctactagtgccaccatggactggatttggcgcatccttttccttgtcggcgctgctaccggcgcccattccttcgaacaagttcagcttcaacagcctggcgctgagctggtcaaacctggcgcttctgtgaagatgagctgcaaagccagcggctacgccttcagcagctactggatcaactggatgaagcagaaacccggccagggactcgaatggatcggccaaatctatcccggcgacggcgacaccaactacaacggcaagttcaagggcagagccacactgaccgccgatacctctagcagcacagcctacatgcagctgagcagcctgaccagcgaagatagcgccgtgtacttctgtgcccggtccatcacaacagtcgtgggctgcgctatggactattggggccagggaacaagcgtgaccgtgtctagtacgcgtatccagaaccctgatcctgccgtgtaccagctgcgggatagcaagagcagcgacaagagcgtgtgtctgttcaccgacttcgacagccagaccaacgtgtcccagagcaaggactccgacgtgtacatcaccgataagtgcgtgctggacatgcggagcatggacttcaagagcaactccgccgtggcctggtccaacaagtccgatttcgcctgcgccaacgccttcaacaacagcattatccccgaggacacattcttcccaagccccgagagcagctgcgacgtgaagctggtggaaaagagcttcgagacagacaccaacctgaacttccagaacctgagcgtgatcggcttcagaatcctgctgctgaaagtggccggctttaacctgctgatgaccctgcggctgtggtccagctaa

SEQ ID NO: 8341 - DNA, 1971 bp, synthetic construct
  source 1..1971: mol_type = other DNA
atggccttaccagtgaccgccttgctcctgccgctggccttgctgctccacgccgccaggccggcatgcgtgagcggctggcgcctgttcaagaagatcagcggtaccggcggaggcggatctggcggcggaggtagcggtggcggaggatctgaattcgacatccagatgacacagagccctagcagcctgtctgccagcgtgggagacagagtgaccatcacatgcaaggccagcgaccacatcaacaactggctggcctggtatcagcagaagcctggacaggcccctaagctgctgatctacggcgctaccacactggaaacaggcgtgcccagcagattttctggcagcggctctggcaccgactacaccctgacaatatccagcctccagcctgaggacttcgccacctactactgtcagcagagctggaacaccccttggacattcggccagggcaccaagctggaaatcaagagactcgaggacctgaagaacgtgttcccacctgaggtggccgtgttcgagcctagcgaggccgagatcagccacacccagaaagccaccctcgtgtgcctggctaccggcttctaccccgaccatgtggaactgtcttggtgggtcaacggcaaagaggtgcacagcggcgtgtgtaccgacccccagccactgaaagaacagcccgccctgaacgacagccggtactgcctgagcagcagactgagagtgtccgccaccttctggcagaacccccggaaccacttcagatgccaggtgcagttctacggcctgagcgagaacgacgagtggacccaggacagagccaagcccgtgacccagatcgtgtctgccgaagcctggggcagagccgattgcggctttaccagcgagagctaccagcagggcgtgctgagcgccaccatcctgtacgagatcctgctgggcaaggccaccctgtacgccgtgctggtgtctgccctggtgctgatggctatggtcaagcggaaggacagccggggaagggccaagcgatctggatctggagcaacaaacttctcactactcaaacaagcaggtgacgtggaggagaatcccgggcctactagtgccaccatggactggatttggcgcatccttttccttgtcggcgctgctaccggcgcccattccttcgaacaagttcagcttcaacagcctggcgctgagctggtcaaacctggcgcttctgtgaagatgagctgcaaagccagcggctacgccttcagcagctactggatcaactggatgaagcagaaacccggccagggactcgaatggatcggccaaatctatcccggcgacggcgacaccaactacaacggcaagttcaagggcagagccacactgaccgccgatacctctagcagcacagcctacatgcagctgagcagcctgaccagcgaagatagcgccgtgtacttctgtgcccggtccatcacaacagtcgtgggctgcgctatggactattggggccagggaacaagcgtgaccgtgtctagtacgcgtatccagaaccctgatcctgccgtgtaccagctgcgggatagcaagagcagcgacaagagcgtgtgtctgttcaccgacttcgacagccagaccaacgtgtcccagagcaaggactccgacgtgtacatcaccgataagtgcgtgctggacatgcggagcatggacttcaagagcaactccgccgtggcctggtccaacaagtccgatttcgcctgcgccaacgccttcaacaacagcattatccccgaggacacattcttcccaagccccgagagcagctgcgacgtgaagctggtggaaaagagcttcgagacagacaccaacctgaacttccagaacctgagcgtgatcggcttcagaatcctgctgctgaaagtggccggctttaacctgctgatgaccctgcggctgtggtccagctaa

SEQ ID NO: 8342 - DNA, 1965 bp, synthetic construct
  source 1..1965: mol_type = other DNA
atggccttaccagtgaccgccttgctcctgccgctggccttgctgctccacgccgccaggccggcatgccaggccgccgccgagaccctgagcgagggtaccggcggaggcggatctggcggcggaggtagcggtggcggaggatctgaattcgacatccagatgacacagagccctagcagcctgtctgccagcgtgggagacagagtgaccatcacatgcaaggccagcgaccacatcaacaactggctggcctggtatcagcagaagcctggacaggcccctaagctgctgatctacggcgctaccacactggaaacaggcgtgcccagcagattttctggcagcggctctggcaccgactacaccctgacaatatccagcctccagcctgaggacttcgccacctactactgtcagcagagctggaacaccccttggacattcggccagggcaccaagctggaaatcaagagactcgaggacctgaagaacgtgttcccacctgaggtggccgtgttcgagcctagcgaggccgagatcagccacacccagaaagccaccctcgtgtgcctggctaccggcttctaccccgaccatgtggaactgtcttggtgggtcaacggcaaagaggtgcacagcggcgtgtgtaccgacccccagccactgaaagaacagcccgccctgaacgacagccggtactgcctgagcagcagactgagagtgtccgccaccttctggcagaacccccggaaccacttcagatgccaggtgcagttctacggcctgagcgagaacgacgagtggacccaggacagagccaagcccgtgacccagatcgtgtctgccgaagcctggggcagagccgattgcggctttaccagcgagagctaccagcagggcgtgctgagcgccaccatcctgtacgagatcctgctgggcaaggccaccctgtacgccgtgctggtgtctgccctggtgctgatggctatggtcaagcggaaggacagccggggaagggccaagcgatctggatctggagcaacaaacttctcactactcaaacaagcaggtgacgtggaggagaatcccgggcctactagtgccaccatggactggatttggcgcatccttttccttgtcggcgctgctaccggcgcccattccttcgaacaagttcagcttcaacagcctggcgctgagctggtcaaacctggcgcttctgtgaagatgagctgcaaagccagcggctacgccttcagcagctactggatcaactggatgaagcagaaacccggccagggactcgaatggatcggccaaatctatcccggcgacggcgacaccaactacaacggcaagttcaagggcagagccacactgaccgccgatacctctagcagcacagcctacatgcagctgagcagcctgaccagcgaagatagcgccgtgtacttctgtgcccggtccatcacaacagtcgtgggctgcgctatggactattggggccagggaacaagcgtgaccgtgtctagtacgcgtatccagaaccctgatcctgccgtgtaccagctgcgggatagcaagagcagcgacaagagcgtgtgtctgttcaccgacttcgacagccagaccaacgtgtcccagagcaaggactccgacgtgtacatcaccgataagtgcgtgctggacatgcggagcatggacttcaagagcaactccgccgtggcctggtccaacaagtccgatttcgcctgcgccaacgccttcaacaacagcattatccccgaggacacattcttcccaagccccgagagcagctgcgacgtgaagctggtggaaaagagcttcgagacagacaccaacctgaacttccagaacctgagcgtgatcggcttcagaatcctgctgctgaaagtggccggctttaacctgctgatgaccctgcggctgtggtccagctaa

SEQ ID NO: 8343 - DNA, 1962 bp, synthetic construct
  source 1..1962: mol_type = other DNA
atggccttaccagtgaccgccttgctcctgccgctggccttgctgctccacgccgccaggccggcatgcgccgccgccgagaccctgagcgagggtaccggcggaggcggatctggcggcggaggtagcggtggcggaggatctgaattcgacatccagatgacacagagccctagcagcctgtctgccagcgtgggagacagagtgaccatcacatgcaaggccagcgaccacatcaacaactggctggcctggtatcagcagaagcctggacaggcccctaagctgctgatctacggcgctaccacactggaaacaggcgtgcccagcagattttctggcagcggctctggcaccgactacaccctgacaatatccagcctccagcctgaggacttcgccacctactactgtcagcagagctggaacaccccttggacattcggccagggcaccaagctggaaatcaagagactcgaggacctgaagaacgtgttcccacctgaggtggccgtgttcgagcctagcgaggccgagatcagccacacccagaaagccaccctcgtgtgcctggctaccggcttctaccccgaccatgtggaactgtcttggtgggtcaacggcaaagaggtgcacagcggcgtgtgtaccgacccccagccactgaaagaacagcccgccctgaacgacagccggtactgcctgagcagcagactgagagtgtccgccaccttctggcagaacccccggaaccacttcagatgccaggtgcagttctacggcctgagcgagaacgacgagtggacccaggacagagccaagcccgtgacccagatcgtgtctgccgaagcctggggcagagccgattgcggctttaccagcgagagctaccagcagggcgtgctgagcgccaccatcctgtacgagatcctgctgggcaaggccaccctgtacgccgtgctggtgtctgccctggtgctgatggctatggtcaagcggaaggacagccggggaagggccaagcgatctggatctggagcaacaaacttctcactactcaaacaagcaggtgacgtggaggagaatcccgggcctactagtgccaccatggactggatttggcgcatccttttccttgtcggcgctgctaccggcgcccattccttcgaacaagttcagcttcaacagcctggcgctgagctggtcaaacctggcgcttctgtgaagatgagctgcaaagccagcggctacgccttcagcagctactggatcaactggatgaagcagaaacccggccagggactcgaatggatcggccaaatctatcccggcgacggcgacaccaactacaacggcaagttcaagggcagagccacactgaccgccgatacctctagcagcacagcctacatgcagctgagcagcctgaccagcgaagatagcgccgtgtacttctgtgcccggtccatcacaacagtcgtgggctgcgctatggactattggggccagggaacaagcgtgaccgtgtctagtacgcgtatccagaaccctgatcctgccgtgtaccagctgcgggatagcaagagcagcgacaagagcgtgtgtctgttcaccgacttcgacagccagaccaacgtgtcccagagcaaggactccgacgtgtacatcaccgataagtgcgtgctggacatgcggagcatggacttcaagagcaactccgccgtggcctggtccaacaagtccgatttcgcctgcgccaacgccttcaacaacagcattatccccgaggacacattcttcccaagccccgagagcagctgcgacgtgaagctggtggaaaagagcttcgagacagacaccaacctgaacttccagaacctgagcgtgatcggcttcagaatcctgctgctgaaagtggccggctttaacctgctgatgaccctgcggctgtggtccagctaa

SEQ ID NO: 8344 - DNA, 1959 bp, synthetic construct
  source 1..1959: mol_type = other DNA
atggccttaccagtgaccgccttgctcctgccgctggccttgctgctccacgccgccaggccggcatgcgccgcccagcccaacaacagcggtaccggcggaggcggatctggcggcggaggtagcggtggcggaggatctgaattcgacatccagatgacacagagccctagcagcctgtctgccagcgtgggagacagagtgaccatcacatgcaaggccagcgaccacatcaacaactggctggcctggtatcagcagaagcctggacaggcccctaagctgctgatctacggcgctaccacactggaaacaggcgtgcccagcagattttctggcagcggctctggcaccgactacaccctgacaatatccagcctccagcctgaggacttcgccacctactactgtcagcagagctggaacaccccttggacattcggccagggcaccaagctggaaatcaagagactcgaggacctgaagaacgtgttcccacctgaggtggccgtgttcgagcctagcgaggccgagatcagccacacccagaaagccaccctcgtgtgcctggctaccggcttctaccccgaccatgtggaactgtcttggtgggtcaacggcaaagaggtgcacagcggcgtgtgtaccgacccccagccactgaaagaacagcccgccctgaacgacagccggtactgcctgagcagcagactgagagtgtccgccaccttctggcagaacccccggaaccacttcagatgccaggtgcagttctacggcctgagcgagaacgacgagtggacccaggacagagccaagcccgtgacccagatcgtgtctgccgaagcctggggcagagccgattgcggctttaccagcgagagctaccagcagggcgtgctgagcgccaccatcctgtacgagatcctgctgggcaaggccaccctgtacgccgtgctggtgtctgccctggtgctgatggctatggtcaagcggaaggacagccggggaagggccaagcgatctggatctggagcaacaaacttctcactactcaaacaagcaggtgacgtggaggagaatcccgggcctactagtgccaccatggactggatttggcgcatccttttccttgtcggcgctgctaccggcgcccattccttcgaacaagttcagcttcaacagcctggcgctgagctggtcaaacctggcgcttctgtgaagatgagctgcaaagccagcggctacgccttcagcagctactggatcaactggatgaagcagaaacccggccagggactcgaatggatcggccaaatctatcccggcgacggcgacaccaactacaacggcaagttcaagggcagagccacactgaccgccgatacctctagcagcacagcctacatgcagctgagcagcctgaccagcgaagatagcgccgtgtacttctgtgcccggtccatcacaacagtcgtgggctgcgctatggactattggggccagggaacaagcgtgaccgtgtctagtacgcgtatccagaaccctgatcctgccgtgtaccagctgcgggatagcaagagcagcgacaagagcgtgtgtctgttcaccgacttcgacagccagaccaacgtgtcccagagcaaggactccgacgtgtacatcaccgataagtgcgtgctggacatgcggagcatggacttcaagagcaactccgccgtggcctggtccaacaagtccgatttcgcctgcgccaacgccttcaacaacagcattatccccgaggacacattcttcccaagccccgagagcagctgcgacgtgaagctggtggaaaagagcttcgagacagacaccaacctgaacttccagaacctgagcgtgatcggcttcagaatcctgctgctgaaagtggccggctttaacctgctgatgaccctgcggctgtggtccagctaa

SEQ ID NO: 8345 - DNA, 1959 bp, synthetic construct
  source 1..1959: mol_type = other DNA
atggccttaccagtgaccgccttgctcctgccgctggccttgctgctccacgccgccaggccggcatgctgggtgagccagccccccgagggtaccggcggaggcggatctggcggcggaggtagcggtggcggaggatctgaattcgacatccagatgacacagagccctagcagcctgtctgccagcgtgggagacagagtgaccatcacatgcaaggccagcgaccacatcaacaactggctggcctggtatcagcagaagcctggacaggcccctaagctgctgatctacggcgctaccacactggaaacaggcgtgcccagcagattttctggcagcggctctggcaccgactacaccctgacaatatccagcctccagcctgaggacttcgccacctactactgtcagcagagctggaacaccccttggacattcggccagggcaccaagctggaaatcaagagactcgaggacctgaagaacgtgttcccacctgaggtggccgtgttcgagcctagcgaggccgagatcagccacacccagaaagccaccctcgtgtgcctggctaccggcttctaccccgaccatgtggaactgtcttggtgggtcaacggcaaagaggtgcacagcggcgtgtgtaccgacccccagccactgaaagaacagcccgccctgaacgacagccggtactgcctgagcagcagactgagagtgtccgccaccttctggcagaacccccggaaccacttcagatgccaggtgcagttctacggcctgagcgagaacgacgagtggacccaggacagagccaagcccgtgacccagatcgtgtctgccgaagcctggggcagagccgattgcggctttaccagcgagagctaccagcagggcgtgctgagcgccaccatcctgtacgagatcctgctgggcaaggccaccctgtacgccgtgctggtgtctgccctggtgctgatggctatggtcaagcggaaggacagccggggaagggccaagcgatctggatctggagcaacaaacttctcactactcaaacaagcaggtgacgtggaggagaatcccgggcctactagtgccaccatggactggatttggcgcatccttttccttgtcggcgctgctaccggcgcccattccttcgaacaagttcagcttcaacagcctggcgctgagctggtcaaacctggcgcttctgtgaagatgagctgcaaagccagcggctacgccttcagcagctactggatcaactggatgaagcagaaacccggccagggactcgaatggatcggccaaatctatcccggcgacggcgacaccaactacaacggcaagttcaagggcagagccacactgaccgccgatacctctagcagcacagcctacatgcagctgagcagcctgaccagcgaagatagcgccgtgtacttctgtgcccggtccatcacaacagtcgtgggctgcgctatggactattggggccagggaacaagcgtgaccgtgtctagtacgcgtatccagaaccctgatcctgccgtgtaccagctgcgggatagcaagagcagcgacaagagcgtgtgtctgttcaccgacttcgacagccagaccaacgtgtcccagagcaaggactccgacgtgtacatcaccgataagtgcgtgctggacatgcggagcatggacttcaagagcaactccgccgtggcctggtccaacaagtccgatttcgcctgcgccaacgccttcaacaacagcattatccccgaggacacattcttcccaagccccgagagcagctgcgacgtgaagctggtggaaaagagcttcgagacagacaccaacctgaacttccagaacctgagcgtgatcggcttcagaatcctgctgctgaaagtggccggctttaacctgctgatgaccctgcggctgtggtccagctaa

SEQ ID NO: 8346 - DNA, 1962 bp, synthetic construct
  source 1..1962: mol_type = other DNA
atggccttaccagtgaccgccttgctcctgccgctggccttgctgctccacgccgccaggccggcatgccagcagcagaccctgcccaagcccggtaccggcggaggcggatctggcggcggaggtagcggtggcggaggatctgaattcgacatccagatgacacagagccctagcagcctgtctgccagcgtgggagacagagtgaccatcacatgcaaggccagcgaccacatcaacaactggctggcctggtatcagcagaagcctggacaggcccctaagctgctgatctacggcgctaccacactggaaacaggcgtgcccagcagattttctggcagcggctctggcaccgactacaccctgacaatatccagcctccagcctgaggacttcgccacctactactgtcagcagagctggaacaccccttggacattcggccagggcaccaagctggaaatcaagagactcgaggacctgaagaacgtgttcccacctgaggtggccgtgttcgagcctagcgaggccgagatcagccacacccagaaagccaccctcgtgtgcctggctaccggcttctaccccgaccatgtggaactgtcttggtgggtcaacggcaaagaggtgcacagcggcgtgtgtaccgacccccagccactgaaagaacagcccgccctgaacgacagccggtactgcctgagcagcagactgagagtgtccgccaccttctggcagaacccccggaaccacttcagatgccaggtgcagttctacggcctgagcgagaacgacgagtggacccaggacagagccaagcccgtgacccagatcgtgtctgccgaagcctggggcagagccgattgcggctttaccagcgagagctaccagcagggcgtgctgagcgccaccatcctgtacgagatcctgctgggcaaggccaccctgtacgccgtgctggtgtctgccctggtgctgatggctatggtcaagcggaaggacagccggggaagggccaagcgatctggatctggagcaacaaacttctcactactcaaacaagcaggtgacgtggaggagaatcccgggcctactagtgccaccatggactggatttggcgcatccttttccttgtcggcgctgctaccggcgcccattccttcgaacaagttcagcttcaacagcctggcgctgagctggtcaaacctggcgcttctgtgaagatgagctgcaaagccagcggctacgccttcagcagctactggatcaactggatgaagcagaaacccggccagggactcgaatggatcggccaaatctatcccggcgacggcgacaccaactacaacggcaagttcaagggcagagccacactgaccgccgatacctctagcagcacagcctacatgcagctgagcagcctgaccagcgaagatagcgccgtgtacttctgtgcccggtccatcacaacagtcgtgggctgcgctatggactattggggccagggaacaagcgtgaccgtgtctagtacgcgtatccagaaccctgatcctgccgtgtaccagctgcgggatagcaagagcagcgacaagagcgtgtgtctgttcaccgacttcgacagccagaccaacgtgtcccagagcaaggactccgacgtgtacatcaccgataagtgcgtgctggacatgcggagcatggacttcaagagcaactccgccgtggcctggtccaacaagtccgatttcgcctgcgccaacgccttcaacaacagcattatccccgaggacacattcttcccaagccccgagagcagctgcgacgtgaagctggtggaaaagagcttcgagacagacaccaacctgaacttccagaacctgagcgtgatcggcttcagaatcctgctgctgaaagtggccggctttaacctgctgatgaccctgcggctgtggtccagctaa

SEQ ID NO: 8347 - DNA, 1956 bp, synthetic construct
  source 1..1956: mol_type = other DNA
atggccttaccagtgaccgccttgctcctgccgctggccttgctgctccacgccgccaggccggcatgccagagcaaggcccaggtgggtaccggcggaggcggatctggcggcggaggtagcggtggcggaggatctgaattcgacatccagatgacacagagccctagcagcctgtctgccagcgtgggagacagagtgaccatcacatgcaaggccagcgaccacatcaacaactggctggcctggtatcagcagaagcctggacaggcccctaagctgctgatctacggcgctaccacactggaaacaggcgtgcccagcagattttctggcagcggctctggcaccgactacaccctgacaatatccagcctccagcctgaggacttcgccacctactactgtcagcagagctggaacaccccttggacattcggccagggcaccaagctggaaatcaagagactcgaggacctgaagaacgtgttcccacctgaggtggccgtgttcgagcctagcgaggccgagatcagccacacccagaaagccaccctcgtgtgcctggctaccggcttctaccccgaccatgtggaactgtcttggtgggtcaacggcaaagaggtgcacagcggcgtgtgtaccgacccccagccactgaaagaacagcccgccctgaacgacagccggtactgcctgagcagcagactgagagtgtccgccaccttctggcagaacccccggaaccacttcagatgccaggtgcagttctacggcctgagcgagaacgacgagtggacccaggacagagccaagcccgtgacccagatcgtgtctgccgaagcctggggcagagccgattgcggctttaccagcgagagctaccagcagggcgtgctgagcgccaccatcctgtacgagatcctgctgggcaaggccaccctgtacgccgtgctggtgtctgccctggtgctgatggctatggtcaagcggaaggacagccggggaagggccaagcgatctggatctggagcaacaaacttctcactactcaaacaagcaggtgacgtggaggagaatcccgggcctactagtgccaccatggactggatttggcgcatccttttccttgtcggcgctgctaccggcgcccattccttcgaacaagttcagcttcaacagcctggcgctgagctggtcaaacctggcgcttctgtgaagatgagctgcaaagccagcggctacgccttcagcagctactggatcaactggatgaagcagaaacccggccagggactcgaatggatcggccaaatctatcccggcgacggcgacaccaactacaacggcaagttcaagggcagagccacactgaccgccgatacctctagcagcacagcctacatgcagctgagcagcctgaccagcgaagatagcgccgtgtacttctgtgcccggtccatcacaacagtcgtgggctgcgctatggactattggggccagggaacaagcgtgaccgtgtctagtacgcgtatccagaaccctgatcctgccgtgtaccagctgcgggatagcaagagcagcgacaagagcgtgtgtctgttcaccgacttcgacagccagaccaacgtgtcccagagcaaggactccgacgtgtacatcaccgataagtgcgtgctggacatgcggagcatggacttcaagagcaactccgccgtggcctggtccaacaagtccgatttcgcctgcgccaacgccttcaacaacagcattatccccgaggacacattcttcccaagccccgagagcagctgcgacgtgaagctggtggaaaagagcttcgagacagacaccaacctgaacttccagaacctgagcgtgatcggcttcagaatcctgctgctgaaagtggccggctttaacctgctgatgaccctgcggctgtggtccagctaa

SEQ ID NO: 8348 - DNA, 1962 bp, synthetic construct
  source 1..1962: mol_type = other DNA
atggccttaccagtgaccgccttgctcctgccgctggccttgctgctccacgccgccaggccggcatgccgcaccgaggacctgcccaaggccggtaccggcggaggcggatctggcggcggaggtagcggtggcggaggatctgaattcgacatccagatgacacagagccctagcagcctgtctgccagcgtgggagacagagtgaccatcacatgcaaggccagcgaccacatcaacaactggctggcctggtatcagcagaagcctggacaggcccctaagctgctgatctacggcgctaccacactggaaacaggcgtgcccagcagattttctggcagcggctctggcaccgactacaccctgacaatatccagcctccagcctgaggacttcgccacctactactgtcagcagagctggaacaccccttggacattcggccagggcaccaagctggaaatcaagagactcgaggacctgaagaacgtgttcccacctgaggtggccgtgttcgagcctagcgaggccgagatcagccacacccagaaagccaccctcgtgtgcctggctaccggcttctaccccgaccatgtggaactgtcttggtgggtcaacggcaaagaggtgcacagcggcgtgtgtaccgacccccagccactgaaagaacagcccgccctgaacgacagccggtactgcctgagcagcagactgagagtgtccgccaccttctggcagaacccccggaaccacttcagatgccaggtgcagttctacggcctgagcgagaacgacgagtggacccaggacagagccaagcccgtgacccagatcgtgtctgccgaagcctggggcagagccgattgcggctttaccagcgagagctaccagcagggcgtgctgagcgccaccatcctgtacgagatcctgctgggcaaggccaccctgtacgccgtgctggtgtctgccctggtgctgatggctatggtcaagcggaaggacagccggggaagggccaagcgatctggatctggagcaacaaacttctcactactcaaacaagcaggtgacgtggaggagaatcccgggcctactagtgccaccatggactggatttggcgcatccttttccttgtcggcgctgctaccggcgcccattccttcgaacaagttcagcttcaacagcctggcgctgagctggtcaaacctggcgcttctgtgaagatgagctgcaaagccagcggctacgccttcagcagctactggatcaactggatgaagcagaaacccggccagggactcgaatggatcggccaaatctatcccggcgacggcgacaccaactacaacggcaagttcaagggcagagccacactgaccgccgatacctctagcagcacagcctacatgcagctgagcagcctgaccagcgaagatagcgccgtgtacttctgtgcccggtccatcacaacagtcgtgggctgcgctatggactattggggccagggaacaagcgtgaccgtgtctagtacgcgtatccagaaccctgatcctgccgtgtaccagctgcgggatagcaagagcagcgacaagagcgtgtgtctgttcaccgacttcgacagccagaccaacgtgtcccagagcaaggactccgacgtgtacatcaccgataagtgcgtgctggacatgcggagcatggacttcaagagcaactccgccgtggcctggtccaacaagtccgatttcgcctgcgccaacgccttcaacaacagcattatccccgaggacacattcttcccaagccccgagagcagctgcgacgtgaagctggtggaaaagagcttcgagacagacaccaacctgaacttccagaacctgagcgtgatcggcttcagaatcctgctgctgaaagtggccggctttaacctgctgatgaccctgcggctgtggtccagctaa

SEQ ID NO: 8349 - DNA, 1962 bp, synthetic construct
  source 1..1962: mol_type = other DNA
atggccttaccagtgaccgccttgctcctgccgctggccttgctgctccacgccgccaggccggcatgcatgcccatctggaagttccccgacggtaccggcggaggcggatctggcggcggaggtagcggtggcggaggatctgaattcgacatccagatgacacagagccctagcagcctgtctgccagcgtgggagacagagtgaccatcacatgcaaggccagcgaccacatcaacaactggctggcctggtatcagcagaagcctggacaggcccctaagctgctgatctacggcgctaccacactggaaacaggcgtgcccagcagattttctggcagcggctctggcaccgactacaccctgacaatatccagcctccagcctgaggacttcgccacctactactgtcagcagagctggaacaccccttggacattcggccagggcaccaagctggaaatcaagagactcgaggacctgaagaacgtgttcccacctgaggtggccgtgttcgagcctagcgaggccgagatcagccacacccagaaagccaccctcgtgtgcctggctaccggcttctaccccgaccatgtggaactgtcttggtgggtcaacggcaaagaggtgcacagcggcgtgtgtaccgacccccagccactgaaagaacagcccgccctgaacgacagccggtactgcctgagcagcagactgagagtgtccgccaccttctggcagaacccccggaaccacttcagatgccaggtgcagttctacggcctgagcgagaacgacgagtggacccaggacagagccaagcccgtgacccagatcgtgtctgccgaagcctggggcagagccgattgcggctttaccagcgagagctaccagcagggcgtgctgagcgccaccatcctgtacgagatcctgctgggcaaggccaccctgtacgccgtgctggtgtctgccctggtgctgatggctatggtcaagcggaaggacagccggggaagggccaagcgatctggatctggagcaacaaacttctcactactcaaacaagcaggtgacgtggaggagaatcccgggcctactagtgccaccatggactggatttggcgcatccttttccttgtcggcgctgctaccggcgcccattccttcgaacaagttcagcttcaacagcctggcgctgagctggtcaaacctggcgcttctgtgaagatgagctgcaaagccagcggctacgccttcagcagctactggatcaactggatgaagcagaaacccggccagggactcgaatggatcggccaaatctatcccggcgacggcgacaccaactacaacggcaagttcaagggcagagccacactgaccgccgatacctctagcagcacagcctacatgcagctgagcagcctgaccagcgaagatagcgccgtgtacttctgtgcccggtccatcacaacagtcgtgggctgcgctatggactattggggccagggaacaagcgtgaccgtgtctagtacgcgtatccagaaccctgatcctgccgtgtaccagctgcgggatagcaagagcagcgacaagagcgtgtgtctgttcaccgacttcgacagccagaccaacgtgtcccagagcaaggactccgacgtgtacatcaccgataagtgcgtgctggacatgcggagcatggacttcaagagcaactccgccgtggcctggtccaacaagtccgatttcgcctgcgccaacgccttcaacaacagcattatccccgaggacacattcttcccaagccccgagagcagctgcgacgtgaagctggtggaaaagagcttcgagacagacaccaacctgaacttccagaacctgagcgtgatcggcttcagaatcctgctgctgaaagtggccggctttaacctgctgatgaccctgcggctgtggtccagctaa

SEQ ID NO: 8350 - DNA, 1959 bp, synthetic construct
  source 1..1959: mol_type = other DNA
atggccttaccagtgaccgccttgctcctgccgctggccttgctgctccacgccgccaggccggcatgcatgcccatctggaagttccccggtaccggcggaggcggatctggcggcggaggtagcggtggcggaggatctgaattcgacatccagatgacacagagccctagcagcctgtctgccagcgtgggagacagagtgaccatcacatgcaaggccagcgaccacatcaacaactggctggcctggtatcagcagaagcctggacaggcccctaagctgctgatctacggcgctaccacactggaaacaggcgtgcccagcagattttctggcagcggctctggcaccgactacaccctgacaatatccagcctccagcctgaggacttcgccacctactactgtcagcagagctggaacaccccttggacattcggccagggcaccaagctggaaatcaagagactcgaggacctgaagaacgtgttcccacctgaggtggccgtgttcgagcctagcgaggccgagatcagccacacccagaaagccaccctcgtgtgcctggctaccggcttctaccccgaccatgtggaactgtcttggtgggtcaacggcaaagaggtgcacagcggcgtgtgtaccgacccccagccactgaaagaacagcccgccctgaacgacagccggtactgcctgagcagcagactgagagtgtccgccaccttctggcagaacccccggaaccacttcagatgccaggtgcagttctacggcctgagcgagaacgacgagtggacccaggacagagccaagcccgtgacccagatcgtgtctgccgaagcctggggcagagccgattgcggctttaccagcgagagctaccagcagggcgtgctgagcgccaccatcctgtacgagatcctgctgggcaaggccaccctgtacgccgtgctggtgtctgccctggtgctgatggctatggtcaagcggaaggacagccggggaagggccaagcgatctggatctggagcaacaaacttctcactactcaaacaagcaggtgacgtggaggagaatcccgggcctactagtgccaccatggactggatttggcgcatccttttccttgtcggcgctgctaccggcgcccattccttcgaacaagttcagcttcaacagcctggcgctgagctggtcaaacctggcgcttctgtgaagatgagctgcaaagccagcggctacgccttcagcagctactggatcaactggatgaagcagaaacccggccagggactcgaatggatcggccaaatctatcccggcgacggcgacaccaactacaacggcaagttcaagggcagagccacactgaccgccgatacctctagcagcacagcctacatgcagctgagcagcctgaccagcgaagatagcgccgtgtacttctgtgcccggtccatcacaacagtcgtgggctgcgctatggactattggggccagggaacaagcgtgaccgtgtctagtacgcgtatccagaaccctgatcctgccgtgtaccagctgcgggatagcaagagcagcgacaagagcgtgtgtctgttcaccgacttcgacagccagaccaacgtgtcccagagcaaggactccgacgtgtacatcaccgataagtgcgtgctggacatgcggagcatggacttcaagagcaactccgccgtggcctggtccaacaagtccgatttcgcctgcgccaacgccttcaacaacagcattatccccgaggacacattcttcccaagccccgagagcagctgcgacgtgaagctggtggaaaagagcttcgagacagacaccaacctgaacttccagaacctgagcgtgatcggcttcagaatcctgctgctgaaagtggccggctttaacctgctgatgaccctgcggctgtggtccagctaa

SEQ ID NO: 8351 - DNA, 1956 bp, synthetic construct
  source 1..1956: mol_type = other DNA
atggccttaccagtgaccgccttgctcctgccgctggccttgctgctccacgccgccaggccggcatgccccatctggaagttccccggtaccggcggaggcggatctggcggcggaggtagcggtggcggaggatctgaattcgacatccagatgacacagagccctagcagcctgtctgccagcgtgggagacagagtgaccatcacatgcaaggccagcgaccacatcaacaactggctggcctggtatcagcagaagcctggacaggcccctaagctgctgatctacggcgctaccacactggaaacaggcgtgcccagcagattttctggcagcggctctggcaccgactacaccctgacaatatccagcctccagcctgaggacttcgccacctactactgtcagcagagctggaacaccccttggacattcggccagggcaccaagctggaaatcaagagactcgaggacctgaagaacgtgttcccacctgaggtggccgtgttcgagcctagcgaggccgagatcagccacacccagaaagccaccctcgtgtgcctggctaccggcttctaccccgaccatgtggaactgtcttggtgggtcaacggcaaagaggtgcacagcggcgtgtgtaccgacccccagccactgaaagaacagcccgccctgaacgacagccggtactgcctgagcagcagactgagagtgtccgccaccttctggcagaacccccggaaccacttcagatgccaggtgcagttctacggcctgagcgagaacgacgagtggacccaggacagagccaagcccgtgacccagatcgtgtctgccgaagcctggggcagagccgattgcggctttaccagcgagagctaccagcagggcgtgctgagcgccaccatcctgtacgagatcctgctgggcaaggccaccctgtacgccgtgctggtgtctgccctggtgctgatggctatggtcaagcggaaggacagccggggaagggccaagcgatctggatctggagcaacaaacttctcactactcaaacaagcaggtgacgtggaggagaatcccgggcctactagtgccaccatggactggatttggcgcatccttttccttgtcggcgctgctaccggcgcccattccttcgaacaagttcagcttcaacagcctggcgctgagctggtcaaacctggcgcttctgtgaagatgagctgcaaagccagcggctacgccttcagcagctactggatcaactggatgaagcagaaacccggccagggactcgaatggatcggccaaatctatcccggcgacggcgacaccaactacaacggcaagttcaagggcagagccacactgaccgccgatacctctagcagcacagcctacatgcagctgagcagcctgaccagcgaagatagcgccgtgtacttctgtgcccggtccatcacaacagtcgtgggctgcgctatggactattggggccagggaacaagcgtgaccgtgtctagtacgcgtatccagaaccctgatcctgccgtgtaccagctgcgggatagcaagagcagcgacaagagcgtgtgtctgttcaccgacttcgacagccagaccaacgtgtcccagagcaaggactccgacgtgtacatcaccgataagtgcgtgctggacatgcggagcatggacttcaagagcaactccgccgtggcctggtccaacaagtccgatttcgcctgcgccaacgccttcaacaacagcattatccccgaggacacattcttcccaagccccgagagcagctgcgacgtgaagctggtggaaaagagcttcgagacagacaccaacctgaacttccagaacctgagcgtgatcggcttcagaatcctgctgctgaaagtggccggctttaacctgctgatgaccctgcggctgtggtccagctaa

SEQ ID NO: 8352 - DNA, 1953 bp, synthetic construct
  source 1..1953: mol_type = other DNA
atggccttaccagtgaccgccttgctcctgccgctggccttgctgctccacgccgccaggccggcatgcatctggaagttccccggtaccggcggaggcggatctggcggcggaggtagcggtggcggaggatctgaattcgacatccagatgacacagagccctagcagcctgtctgccagcgtgggagacagagtgaccatcacatgcaaggccagcgaccacatcaacaactggctggcctggtatcagcagaagcctggacaggcccctaagctgctgatctacggcgctaccacactggaaacaggcgtgcccagcagattttctggcagcggctctggcaccgactacaccctgacaatatccagcctccagcctgaggacttcgccacctactactgtcagcagagctggaacaccccttggacattcggccagggcaccaagctggaaatcaagagactcgaggacctgaagaacgtgttcccacctgaggtggccgtgttcgagcctagcgaggccgagatcagccacacccagaaagccaccctcgtgtgcctggctaccggcttctaccccgaccatgtggaactgtcttggtgggtcaacggcaaagaggtgcacagcggcgtgtgtaccgacccccagccactgaaagaacagcccgccctgaacgacagccggtactgcctgagcagcagactgagagtgtccgccaccttctggcagaacccccggaaccacttcagatgccaggtgcagttctacggcctgagcgagaacgacgagtggacccaggacagagccaagcccgtgacccagatcgtgtctgccgaagcctggggcagagccgattgcggctttaccagcgagagctaccagcagggcgtgctgagcgccaccatcctgtacgagatcctgctgggcaaggccaccctgtacgccgtgctggtgtctgccctggtgctgatggctatggtcaagcggaaggacagccggggaagggccaagcgatctggatctggagcaacaaacttctcactactcaaacaagcaggtgacgtggaggagaatcccgggcctactagtgccaccatggactggatttggcgcatccttttccttgtcggcgctgctaccggcgcccattccttcgaacaagttcagcttcaacagcctggcgctgagctggtcaaacctggcgcttctgtgaagatgagctgcaaagccagcggctacgccttcagcagctactggatcaactggatgaagcagaaacccggccagggactcgaatggatcggccaaatctatcccggcgacggcgacaccaactacaacggcaagttcaagggcagagccacactgaccgccgatacctctagcagcacagcctacatgcagctgagcagcctgaccagcgaagatagcgccgtgtacttctgtgcccggtccatcacaacagtcgtgggctgcgctatggactattggggccagggaacaagcgtgaccgtgtctagtacgcgtatccagaaccctgatcctgccgtgtaccagctgcgggatagcaagagcagcgacaagagcgtgtgtctgttcaccgacttcgacagccagaccaacgtgtcccagagcaaggactccgacgtgtacatcaccgataagtgcgtgctggacatgcggagcatggacttcaagagcaactccgccgtggcctggtccaacaagtccgatttcgcctgcgccaacgccttcaacaacagcattatccccgaggacacattcttcccaagccccgagagcagctgcgacgtgaagctggtggaaaagagcttcgagacagacaccaacctgaacttccagaacctgagcgtgatcggcttcagaatcctgctgctgaaagtggccggctttaacctgctgatgaccctgcggctgtggtccagctaa

SEQ ID NO: 8353 - DNA, 1959 bp, synthetic construct
  source 1..1959: mol_type = other DNA
atggccttaccagtgaccgccttgctcctgccgctggccttgctgctccacgccgccaggccggcatgccccatctggaagttccccgacggtaccggcggaggcggatctggcggcggaggtagcggtggcggaggatctgaattcgacatccagatgacacagagccctagcagcctgtctgccagcgtgggagacagagtgaccatcacatgcaaggccagcgaccacatcaacaactggctggcctggtatcagcagaagcctggacaggcccctaagctgctgatctacggcgctaccacactggaaacaggcgtgcccagcagattttctggcagcggctctggcaccgactacaccctgacaatatccagcctccagcctgaggacttcgccacctactactgtcagcagagctggaacaccccttggacattcggccagggcaccaagctggaaatcaagagactcgaggacctgaagaacgtgttcccacctgaggtggccgtgttcgagcctagcgaggccgagatcagccacacccagaaagccaccctcgtgtgcctggctaccggcttctaccccgaccatgtggaactgtcttggtgggtcaacggcaaagaggtgcacagcggcgtgtgtaccgacccccagccactgaaagaacagcccgccctgaacgacagccggtactgcctgagcagcagactgagagtgtccgccaccttctggcagaacccccggaaccacttcagatgccaggtgcagttctacggcctgagcgagaacgacgagtggacccaggacagagccaagcccgtgacccagatcgtgtctgccgaagcctggggcagagccgattgcggctttaccagcgagagctaccagcagggcgtgctgagcgccaccatcctgtacgagatcctgctgggcaaggccaccctgtacgccgtgctggtgtctgccctggtgctgatggctatggtcaagcggaaggacagccggggaagggccaagcgatctggatctggagcaacaaacttctcactactcaaacaagcaggtgacgtggaggagaatcccgggcctactagtgccaccatggactggatttggcgcatccttttccttgtcggcgctgctaccggcgcccattccttcgaacaagttcagcttcaacagcctggcgctgagctggtcaaacctggcgcttctgtgaagatgagctgcaaagccagcggctacgccttcagcagctactggatcaactggatgaagcagaaacccggccagggactcgaatggatcggccaaatctatcccggcgacggcgacaccaactacaacggcaagttcaagggcagagccacactgaccgccgatacctctagcagcacagcctacatgcagctgagcagcctgaccagcgaagatagcgccgtgtacttctgtgcccggtccatcacaacagtcgtgggctgcgctatggactattggggccagggaacaagcgtgaccgtgtctagtacgcgtatccagaaccctgatcctgccgtgtaccagctgcgggatagcaagagcagcgacaagagcgtgtgtctgttcaccgacttcgacagccagaccaacgtgtcccagagcaaggactccgacgtgtacatcaccgataagtgcgtgctggacatgcggagcatggacttcaagagcaactccgccgtggcctggtccaacaagtccgatttcgcctgcgccaacgccttcaacaacagcattatccccgaggacacattcttcccaagccccgagagcagctgcgacgtgaagctggtggaaaagagcttcgagacagacaccaacctgaacttccagaacctgagcgtgatcggcttcagaatcctgctgctgaaagtggccggctttaacctgctgatgaccctgcggctgtggtccagctaa

SEQ ID NO: 8354 - DNA, 1986 bp, synthetic construct
  source 1..1986: mol_type = other DNA
atggccttaccagtgaccgccttgctcctgccgctggccttgctgctccacgccgccaggccggcatgcgacctgagctacatgcccatctggaagttccccgacgaggagggcgccggtaccggcggaggcggatctggcggcggaggtagcggtggcggaggatctgaattcgacatccagatgacacagagccctagcagcctgtctgccagcgtgggagacagagtgaccatcacatgcaaggccagcgaccacatcaacaactggctggcctggtatcagcagaagcctggacaggcccctaagctgctgatctacggcgctaccacactggaaacaggcgtgcccagcagattttctggcagcggctctggcaccgactacaccctgacaatatccagcctccagcctgaggacttcgccacctactactgtcagcagagctggaacaccccttggacattcggccagggcaccaagctggaaatcaagagactcgaggacctgaagaacgtgttcccacctgaggtggccgtgttcgagcctagcgaggccgagatcagccacacccagaaagccaccctcgtgtgcctggctaccggcttctaccccgaccatgtggaactgtcttggtgggtcaacggcaaagaggtgcacagcggcgtgtgtaccgacccccagccactgaaagaacagcccgccctgaacgacagccggtactgcctgagcagcagactgagagtgtccgccaccttctggcagaacccccggaaccacttcagatgccaggtgcagttctacggcctgagcgagaacgacgagtggacccaggacagagccaagcccgtgacccagatcgtgtctgccgaagcctggggcagagccgattgcggctttaccagcgagagctaccagcagggcgtgctgagcgccaccatcctgtacgagatcctgctgggcaaggccaccctgtacgccgtgctggtgtctgccctggtgctgatggctatggtcaagcggaaggacagccggggaagggccaagcgatctggatctggagcaacaaacttctcactactcaaacaagcaggtgacgtggaggagaatcccgggcctactagtgccaccatggactggatttggcgcatccttttccttgtcggcgctgctaccggcgcccattccttcgaacaagttcagcttcaacagcctggcgctgagctggtcaaacctggcgcttctgtgaagatgagctgcaaagccagcggctacgccttcagcagctactggatcaactggatgaagcagaaacccggccagggactcgaatggatcggccaaatctatcccggcgacggcgacaccaactacaacggcaagttcaagggcagagccacactgaccgccgatacctctagcagcacagcctacatgcagctgagcagcctgaccagcgaagatagcgccgtgtacttctgtgcccggtccatcacaacagtcgtgggctgcgctatggactattggggccagggaacaagcgtgaccgtgtctagtacgcgtatccagaaccctgatcctgccgtgtaccagctgcgggatagcaagagcagcgacaagagcgtgtgtctgttcaccgacttcgacagccagaccaacgtgtcccagagcaaggactccgacgtgtacatcaccgataagtgcgtgctggacatgcggagcatggacttcaagagcaactccgccgtggcctggtccaacaagtccgatttcgcctgcgccaacgccttcaacaacagcattatccccgaggacacattcttcccaagccccgagagcagctgcgacgtgaagctggtggaaaagagcttcgagacagacaccaacctgaacttccagaacctgagcgtgatcggcttcagaatcctgctgctgaaagtggccggctttaacctgctgatgaccctgcggctgtggtccagctaa

SEQ ID NO: 8355 - DNA, 1983 bp, synthetic construct
  source 1..1983: mol_type = other DNA
atggccttaccagtgaccgccttgctcctgccgctggccttgctgctccacgccgccaggccggcatgcctgagctacatgcccatctggaagttccccgacgaggagggcgccggtaccggcggaggcggatctggcggcggaggtagcggtggcggaggatctgaattcgacatccagatgacacagagccctagcagcctgtctgccagcgtgggagacagagtgaccatcacatgcaaggccagcgaccacatcaacaactggctggcctggtatcagcagaagcctggacaggcccctaagctgctgatctacggcgctaccacactggaaacaggcgtgcccagcagattttctggcagcggctctggcaccgactacaccctgacaatatccagcctccagcctgaggacttcgccacctactactgtcagcagagctggaacaccccttggacattcggccagggcaccaagctggaaatcaagagactcgaggacctgaagaacgtgttcccacctgaggtggccgtgttcgagcctagcgaggccgagatcagccacacccagaaagccaccctcgtgtgcctggctaccggcttctaccccgaccatgtggaactgtcttggtgggtcaacggcaaagaggtgcacagcggcgtgtgtaccgacccccagccactgaaagaacagcccgccctgaacgacagccggtactgcctgagcagcagactgagagtgtccgccaccttctggcagaacccccggaaccacttcagatgccaggtgcagttctacggcctgagcgagaacgacgagtggacccaggacagagccaagcccgtgacccagatcgtgtctgccgaagcctggggcagagccgattgcggctttaccagcgagagctaccagcagggcgtgctgagcgccaccatcctgtacgagatcctgctgggcaaggccaccctgtacgccgtgctggtgtctgccctggtgctgatggctatggtcaagcggaaggacagccggggaagggccaagcgatctggatctggagcaacaaacttctcactactcaaacaagcaggtgacgtggaggagaatcccgggcctactagtgccaccatggactggatttggcgcatccttttccttgtcggcgctgctaccggcgcccattccttcgaacaagttcagcttcaacagcctggcgctgagctggtcaaacctggcgcttctgtgaagatgagctgcaaagccagcggctacgccttcagcagctactggatcaactggatgaagcagaaacccggccagggactcgaatggatcggccaaatctatcccggcgacggcgacaccaactacaacggcaagttcaagggcagagccacactgaccgccgatacctctagcagcacagcctacatgcagctgagcagcctgaccagcgaagatagcgccgtgtacttctgtgcccggtccatcacaacagtcgtgggctgcgctatggactattggggccagggaacaagcgtgaccgtgtctagtacgcgtatccagaaccctgatcctgccgtgtaccagctgcgggatagcaagagcagcgacaagagcgtgtgtctgttcaccgacttcgacagccagaccaacgtgtcccagagcaaggactccgacgtgtacatcaccgataagtgcgtgctggacatgcggagcatggacttcaagagcaactccgccgtggcctggtccaacaagtccgatttcgcctgcgccaacgccttcaacaacagcattatccccgaggacacattcttcccaagccccgagagcagctgcgacgtgaagctggtggaaaagagcttcgagacagacaccaacctgaacttccagaacctgagcgtgatcggcttcagaatcctgctgctgaaagtggccggctttaacctgctgatgaccctgcggctgtggtccagctaa

SEQ ID NO: 8356 - DNA, 1980 bp, synthetic construct
  source 1..1980: mol_type = other DNA
atggccttaccagtgaccgccttgctcctgccgctggccttgctgctccacgccgccaggccggcatgcagctacatgcccatctggaagttccccgacgaggagggcgccggtaccggcggaggcggatctggcggcggaggtagcggtggcggaggatctgaattcgacatccagatgacacagagccctagcagcctgtctgccagcgtgggagacagagtgaccatcacatgcaaggccagcgaccacatcaacaactggctggcctggtatcagcagaagcctggacaggcccctaagctgctgatctacggcgctaccacactggaaacaggcgtgcccagcagattttctggcagcggctctggcaccgactacaccctgacaatatccagcctccagcctgaggacttcgccacctactactgtcagcagagctggaacaccccttggacattcggccagggcaccaagctggaaatcaagagactcgaggacctgaagaacgtgttcccacctgaggtggccgtgttcgagcctagcgaggccgagatcagccacacccagaaagccaccctcgtgtgcctggctaccggcttctaccccgaccatgtggaactgtcttggtgggtcaacggcaaagaggtgcacagcggcgtgtgtaccgacccccagccactgaaagaacagcccgccctgaacgacagccggtactgcctgagcagcagactgagagtgtccgccaccttctggcagaacccccggaaccacttcagatgccaggtgcagttctacggcctgagcgagaacgacgagtggacccaggacagagccaagcccgtgacccagatcgtgtctgccgaagcctggggcagagccgattgcggctttaccagcgagagctaccagcagggcgtgctgagcgccaccatcctgtacgagatcctgctgggcaaggccaccctgtacgccgtgctggtgtctgccctggtgctgatggctatggtcaagcggaaggacagccggggaagggccaagcgatctggatctggagcaacaaacttctcactactcaaacaagcaggtgacgtggaggagaatcccgggcctactagtgccaccatggactggatttggcgcatccttttccttgtcggcgctgctaccggcgcccattccttcgaacaagttcagcttcaacagcctggcgctgagctggtcaaacctggcgcttctgtgaagatgagctgcaaagccagcggctacgccttcagcagctactggatcaactggatgaagcagaaacccggccagggactcgaatggatcggccaaatctatcccggcgacggcgacaccaactacaacggcaagttcaagggcagagccacactgaccgccgatacctctagcagcacagcctacatgcagctgagcagcctgaccagcgaagatagcgccgtgtacttctgtgcccggtccatcacaacagtcgtgggctgcgctatggactattggggccagggaacaagcgtgaccgtgtctagtacgcgtatccagaaccctgatcctgccgtgtaccagctgcgggatagcaagagcagcgacaagagcgtgtgtctgttcaccgacttcgacagccagaccaacgtgtcccagagcaaggactccgacgtgtacatcaccgataagtgcgtgctggacatgcggagcatggacttcaagagcaactccgccgtggcctggtccaacaagtccgatttcgcctgcgccaacgccttcaacaacagcattatccccgaggacacattcttcccaagccccgagagcagctgcgacgtgaagctggtggaaaagagcttcgagacagacaccaacctgaacttccagaacctgagcgtgatcggcttcagaatcctgctgctgaaagtggccggctttaacctgctgatgaccctgcggctgtggtccagctaa

SEQ ID NO: 8357 - DNA, 1977 bp, synthetic construct
  source 1..1977: mol_type = other DNA
atggccttaccagtgaccgccttgctcctgccgctggccttgctgctccacgccgccaggccggcatgctacatgcccatctggaagttccccgacgaggagggcgccggtaccggcggaggcggatctggcggcggaggtagcggtggcggaggatctgaattcgacatccagatgacacagagccctagcagcctgtctgccagcgtgggagacagagtgaccatcacatgcaaggccagcgaccacatcaacaactggctggcctggtatcagcagaagcctggacaggcccctaagctgctgatctacggcgctaccacactggaaacaggcgtgcccagcagattttctggcagcggctctggcaccgactacaccctgacaatatccagcctccagcctgaggacttcgccacctactactgtcagcagagctggaacaccccttggacattcggccagggcaccaagctggaaatcaagagactcgaggacctgaagaacgtgttcccacctgaggtggccgtgttcgagcctagcgaggccgagatcagccacacccagaaagccaccctcgtgtgcctggctaccggcttctaccccgaccatgtggaactgtcttggtgggtcaacggcaaagaggtgcacagcggcgtgtgtaccgacccccagccactgaaagaacagcccgccctgaacgacagccggtactgcctgagcagcagactgagagtgtccgccaccttctggcagaacccccggaaccacttcagatgccaggtgcagttctacggcctgagcgagaacgacgagtggacccaggacagagccaagcccgtgacccagatcgtgtctgccgaagcctggggcagagccgattgcggctttaccagcgagagctaccagcagggcgtgctgagcgccaccatcctgtacgagatcctgctgggcaaggccaccctgtacgccgtgctggtgtctgccctggtgctgatggctatggtcaagcggaaggacagccggggaagggccaagcgatctggatctggagcaacaaacttctcactactcaaacaagcaggtgacgtggaggagaatcccgggcctactagtgccaccatggactggatttggcgcatccttttccttgtcggcgctgctaccggcgcccattccttcgaacaagttcagcttcaacagcctggcgctgagctggtcaaacctggcgcttctgtgaagatgagctgcaaagccagcggctacgccttcagcagctactggatcaactggatgaagcagaaacccggccagggactcgaatggatcggccaaatctatcccggcgacggcgacaccaactacaacggcaagttcaagggcagagccacactgaccgccgatacctctagcagcacagcctacatgcagctgagcagcctgaccagcgaagatagcgccgtgtacttctgtgcccggtccatcacaacagtcgtgggctgcgctatggactattggggccagggaacaagcgtgaccgtgtctagtacgcgtatccagaaccctgatcctgccgtgtaccagctgcgggatagcaagagcagcgacaagagcgtgtgtctgttcaccgacttcgacagccagaccaacgtgtcccagagcaaggactccgacgtgtacatcaccgataagtgcgtgctggacatgcggagcatggacttcaagagcaactccgccgtggcctggtccaacaagtccgatttcgcctgcgccaacgccttcaacaacagcattatccccgaggacacattcttcccaagccccgagagcagctgcgacgtgaagctggtggaaaagagcttcgagacagacaccaacctgaacttccagaacctgagcgtgatcggcttcagaatcctgctgctgaaagtggccggctttaacctgctgatgaccctgcggctgtggtccagctaa

SEQ ID NO: 8358 - DNA, 1971 bp, synthetic construct
  source 1..1971: mol_type = other DNA
atggccttaccagtgaccgccttgctcctgccgctggccttgctgctccacgccgccaggccggcatgctacatgcccatctggaagttccccgacgaggagggtaccggcggaggcggatctggcggcggaggtagcggtggcggaggatctgaattcgacatccagatgacacagagccctagcagcctgtctgccagcgtgggagacagagtgaccatcacatgcaaggccagcgaccacatcaacaactggctggcctggtatcagcagaagcctggacaggcccctaagctgctgatctacggcgctaccacactggaaacaggcgtgcccagcagattttctggcagcggctctggcaccgactacaccctgacaatatccagcctccagcctgaggacttcgccacctactactgtcagcagagctggaacaccccttggacattcggccagggcaccaagctggaaatcaagagactcgaggacctgaagaacgtgttcccacctgaggtggccgtgttcgagcctagcgaggccgagatcagccacacccagaaagccaccctcgtgtgcctggctaccggcttctaccccgaccatgtggaactgtcttggtgggtcaacggcaaagaggtgcacagcggcgtgtgtaccgacccccagccactgaaagaacagcccgccctgaacgacagccggtactgcctgagcagcagactgagagtgtccgccaccttctggcagaacccccggaaccacttcagatgccaggtgcagttctacggcctgagcgagaacgacgagtggacccaggacagagccaagcccgtgacccagatcgtgtctgccgaagcctggggcagagccgattgcggctttaccagcgagagctaccagcagggcgtgctgagcgccaccatcctgtacgagatcctgctgggcaaggccaccctgtacgccgtgctggtgtctgccctggtgctgatggctatggtcaagcggaaggacagccggggaagggccaagcgatctggatctggagcaacaaacttctcactactcaaacaagcaggtgacgtggaggagaatcccgggcctactagtgccaccatggactggatttggcgcatccttttccttgtcggcgctgctaccggcgcccattccttcgaacaagttcagcttcaacagcctggcgctgagctggtcaaacctggcgcttctgtgaagatgagctgcaaagccagcggctacgccttcagcagctactggatcaactggatgaagcagaaacccggccagggactcgaatggatcggccaaatctatcccggcgacggcgacaccaactacaacggcaagttcaagggcagagccacactgaccgccgatacctctagcagcacagcctacatgcagctgagcagcctgaccagcgaagatagcgccgtgtacttctgtgcccggtccatcacaacagtcgtgggctgcgctatggactattggggccagggaacaagcgtgaccgtgtctagtacgcgtatccagaaccctgatcctgccgtgtaccagctgcgggatagcaagagcagcgacaagagcgtgtgtctgttcaccgacttcgacagccagaccaacgtgtcccagagcaaggactccgacgtgtacatcaccgataagtgcgtgctggacatgcggagcatggacttcaagagcaactccgccgtggcctggtccaacaagtccgatttcgcctgcgccaacgccttcaacaacagcattatccccgaggacacattcttcccaagccccgagagcagctgcgacgtgaagctggtggaaaagagcttcgagacagacaccaacctgaacttccagaacctgagcgtgatcggcttcagaatcctgctgctgaaagtggccggctttaacctgctgatgaccctgcggctgtggtccagctaa

SEQ ID NO: 8359 - DNA, 1974 bp, synthetic construct
  source 1..1974: mol_type = other DNA
atggccttaccagtgaccgccttgctcctgccgctggccttgctgctccacgccgccaggccggcatgcaacaacaccctggtgtggaagtacgccgacgccggcggtaccggcggaggcggatctggcggcggaggtagcggtggcggaggatctgaattcgacatccagatgacacagagccctagcagcctgtctgccagcgtgggagacagagtgaccatcacatgcaaggccagcgaccacatcaacaactggctggcctggtatcagcagaagcctggacaggcccctaagctgctgatctacggcgctaccacactggaaacaggcgtgcccagcagattttctggcagcggctctggcaccgactacaccctgacaatatccagcctccagcctgaggacttcgccacctactactgtcagcagagctggaacaccccttggacattcggccagggcaccaagctggaaatcaagagactcgaggacctgaagaacgtgttcccacctgaggtggccgtgttcgagcctagcgaggccgagatcagccacacccagaaagccaccctcgtgtgcctggctaccggcttctaccccgaccatgtggaactgtcttggtgggtcaacggcaaagaggtgcacagcggcgtgtgtaccgacccccagccactgaaagaacagcccgccctgaacgacagccggtactgcctgagcagcagactgagagtgtccgccaccttctggcagaacccccggaaccacttcagatgccaggtgcagttctacggcctgagcgagaacgacgagtggacccaggacagagccaagcccgtgacccagatcgtgtctgccgaagcctggggcagagccgattgcggctttaccagcgagagctaccagcagggcgtgctgagcgccaccatcctgtacgagatcctgctgggcaaggccaccctgtacgccgtgctggtgtctgccctggtgctgatggctatggtcaagcggaaggacagccggggaagggccaagcgatctggatctggagcaacaaacttctcactactcaaacaagcaggtgacgtggaggagaatcccgggcctactagtgccaccatggactggatttggcgcatccttttccttgtcggcgctgctaccggcgcccattccttcgaacaagttcagcttcaacagcctggcgctgagctggtcaaacctggcgcttctgtgaagatgagctgcaaagccagcggctacgccttcagcagctactggatcaactggatgaagcagaaacccggccagggactcgaatggatcggccaaatctatcccggcgacggcgacaccaactacaacggcaagttcaagggcagagccacactgaccgccgatacctctagcagcacagcctacatgcagctgagcagcctgaccagcgaagatagcgccgtgtacttctgtgcccggtccatcacaacagtcgtgggctgcgctatggactattggggccagggaacaagcgtgaccgtgtctagtacgcgtatccagaaccctgatcctgccgtgtaccagctgcgggatagcaagagcagcgacaagagcgtgtgtctgttcaccgacttcgacagccagaccaacgtgtcccagagcaaggactccgacgtgtacatcaccgataagtgcgtgctggacatgcggagcatggacttcaagagcaactccgccgtggcctggtccaacaagtccgatttcgcctgcgccaacgccttcaacaacagcattatccccgaggacacattcttcccaagccccgagagcagctgcgacgtgaagctggtggaaaagagcttcgagacagacaccaacctgaacttccagaacctgagcgtgatcggcttcagaatcctgctgctgaaagtggccggctttaacctgctgatgaccctgcggctgtggtccagctaa

SEQ ID NO: 8360 - DNA, 1971 bp, synthetic construct
  source 1..1971: mol_type = other DNA
atggccttaccagtgaccgccttgctcctgccgctggccttgctgctccacgccgccaggccggcatgcaacaccctggtgtggaagtacgccgacgccggcggtaccggcggaggcggatctggcggcggaggtagcggtggcggaggatctgaattcgacatccagatgacacagagccctagcagcctgtctgccagcgtgggagacagagtgaccatcacatgcaaggccagcgaccacatcaacaactggctggcctggtatcagcagaagcctggacaggcccctaagctgctgatctacggcgctaccacactggaaacaggcgtgcccagcagattttctggcagcggctctggcaccgactacaccctgacaatatccagcctccagcctgaggacttcgccacctactactgtcagcagagctggaacaccccttggacattcggccagggcaccaagctggaaatcaagagactcgaggacctgaagaacgtgttcccacctgaggtggccgtgttcgagcctagcgaggccgagatcagccacacccagaaagccaccctcgtgtgcctggctaccggcttctaccccgaccatgtggaactgtcttggtgggtcaacggcaaagaggtgcacagcggcgtgtgtaccgacccccagccactgaaagaacagcccgccctgaacgacagccggtactgcctgagcagcagactgagagtgtccgccaccttctggcagaacccccggaaccacttcagatgccaggtgcagttctacggcctgagcgagaacgacgagtggacccaggacagagccaagcccgtgacccagatcgtgtctgccgaagcctggggcagagccgattgcggctttaccagcgagagctaccagcagggcgtgctgagcgccaccatcctgtacgagatcctgctgggcaaggccaccctgtacgccgtgctggtgtctgccctggtgctgatggctatggtcaagcggaaggacagccggggaagggccaagcgatctggatctggagcaacaaacttctcactactcaaacaagcaggtgacgtggaggagaatcccgggcctactagtgccaccatggactggatttggcgcatccttttccttgtcggcgctgctaccggcgcccattccttcgaacaagttcagcttcaacagcctggcgctgagctggtcaaacctggcgcttctgtgaagatgagctgcaaagccagcggctacgccttcagcagctactggatcaactggatgaagcagaaacccggccagggactcgaatggatcggccaaatctatcccggcgacggcgacaccaactacaacggcaagttcaagggcagagccacactgaccgccgatacctctagcagcacagcctacatgcagctgagcagcctgaccagcgaagatagcgccgtgtacttctgtgcccggtccatcacaacagtcgtgggctgcgctatggactattggggccagggaacaagcgtgaccgtgtctagtacgcgtatccagaaccctgatcctgccgtgtaccagctgcgggatagcaagagcagcgacaagagcgtgtgtctgttcaccgacttcgacagccagaccaacgtgtcccagagcaaggactccgacgtgtacatcaccgataagtgcgtgctggacatgcggagcatggacttcaagagcaactccgccgtggcctggtccaacaagtccgatttcgcctgcgccaacgccttcaacaacagcattatccccgaggacacattcttcccaagccccgagagcagctgcgacgtgaagctggtggaaaagagcttcgagacagacaccaacctgaacttccagaacctgagcgtgatcggcttcagaatcctgctgctgaaagtggccggctttaacctgctgatgaccctgcggctgtggtccagctaa

SEQ ID NO: 8361 - DNA, 1968 bp, synthetic construct
  source 1..1968: mol_type = other DNA
atggccttaccagtgaccgccttgctcctgccgctggccttgctgctccacgccgccaggccggcatgcaccctggtgtggaagtacgccgacgccggcggtaccggcggaggcggatctggcggcggaggtagcggtggcggaggatctgaattcgacatccagatgacacagagccctagcagcctgtctgccagcgtgggagacagagtgaccatcacatgcaaggccagcgaccacatcaacaactggctggcctggtatcagcagaagcctggacaggcccctaagctgctgatctacggcgctaccacactggaaacaggcgtgcccagcagattttctggcagcggctctggcaccgactacaccctgacaatatccagcctccagcctgaggacttcgccacctactactgtcagcagagctggaacaccccttggacattcggccagggcaccaagctggaaatcaagagactcgaggacctgaagaacgtgttcccacctgaggtggccgtgttcgagcctagcgaggccgagatcagccacacccagaaagccaccctcgtgtgcctggctaccggcttctaccccgaccatgtggaactgtcttggtgggtcaacggcaaagaggtgcacagcggcgtgtgtaccgacccccagccactgaaagaacagcccgccctgaacgacagccggtactgcctgagcagcagactgagagtgtccgccaccttctggcagaacccccggaaccacttcagatgccaggtgcagttctacggcctgagcgagaacgacgagtggacccaggacagagccaagcccgtgacccagatcgtgtctgccgaagcctggggcagagccgattgcggctttaccagcgagagctaccagcagggcgtgctgagcgccaccatcctgtacgagatcctgctgggcaaggccaccctgtacgccgtgctggtgtctgccctggtgctgatggctatggtcaagcggaaggacagccggggaagggccaagcgatctggatctggagcaacaaacttctcactactcaaacaagcaggtgacgtggaggagaatcccgggcctactagtgccaccatggactggatttggcgcatccttttccttgtcggcgctgctaccggcgcccattccttcgaacaagttcagcttcaacagcctggcgctgagctggtcaaacctggcgcttctgtgaagatgagctgcaaagccagcggctacgccttcagcagctactggatcaactggatgaagcagaaacccggccagggactcgaatggatcggccaaatctatcccggcgacggcgacaccaactacaacggcaagttcaagggcagagccacactgaccgccgatacctctagcagcacagcctacatgcagctgagcagcctgaccagcgaagatagcgccgtgtacttctgtgcccggtccatcacaacagtcgtgggctgcgctatggactattggggccagggaacaagcgtgaccgtgtctagtacgcgtatccagaaccctgatcctgccgtgtaccagctgcgggatagcaagagcagcgacaagagcgtgtgtctgttcaccgacttcgacagccagaccaacgtgtcccagagcaaggactccgacgtgtacatcaccgataagtgcgtgctggacatgcggagcatggacttcaagagcaactccgccgtggcctggtccaacaagtccgatttcgcctgcgccaacgccttcaacaacagcattatccccgaggacacattcttcccaagccccgagagcagctgcgacgtgaagctggtggaaaagagcttcgagacagacaccaacctgaacttccagaacctgagcgtgatcggcttcagaatcctgctgctgaaagtggccggctttaacctgctgatgaccctgcggctgtggtccagctaa

SEQ ID NO: 8362 - DNA, 1962 bp, synthetic construct
  source 1..1962: mol_type = other DNA
atggccttaccagtgaccgccttgctcctgccgctggccttgctgctccacgccgccaggccggcatgcgtgtggaagtacgccgacgccggcggtaccggcggaggcggatctggcggcggaggtagcggtggcggaggatctgaattcgacatccagatgacacagagccctagcagcctgtctgccagcgtgggagacagagtgaccatcacatgcaaggccagcgaccacatcaacaactggctggcctggtatcagcagaagcctggacaggcccctaagctgctgatctacggcgctaccacactggaaacaggcgtgcccagcagattttctggcagcggctctggcaccgactacaccctgacaatatccagcctccagcctgaggacttcgccacctactactgtcagcagagctggaacaccccttggacattcggccagggcaccaagctggaaatcaagagactcgaggacctgaagaacgtgttcccacctgaggtggccgtgttcgagcctagcgaggccgagatcagccacacccagaaagccaccctcgtgtgcctggctaccggcttctaccccgaccatgtggaactgtcttggtgggtcaacggcaaagaggtgcacagcggcgtgtgtaccgacccccagccactgaaagaacagcccgccctgaacgacagccggtactgcctgagcagcagactgagagtgtccgccaccttctggcagaacccccggaaccacttcagatgccaggtgcagttctacggcctgagcgagaacgacgagtggacccaggacagagccaagcccgtgacccagatcgtgtctgccgaagcctggggcagagccgattgcggctttaccagcgagagctaccagcagggcgtgctgagcgccaccatcctgtacgagatcctgctgggcaaggccaccctgtacgccgtgctggtgtctgccctggtgctgatggctatggtcaagcggaaggacagccggggaagggccaagcgatctggatctggagcaacaaacttctcactactcaaacaagcaggtgacgtggaggagaatcccgggcctactagtgccaccatggactggatttggcgcatccttttccttgtcggcgctgctaccggcgcccattccttcgaacaagttcagcttcaacagcctggcgctgagctggtcaaacctggcgcttctgtgaagatgagctgcaaagccagcggctacgccttcagcagctactggatcaactggatgaagcagaaacccggccagggactcgaatggatcggccaaatctatcccggcgacggcgacaccaactacaacggcaagttcaagggcagagccacactgaccgccgatacctctagcagcacagcctacatgcagctgagcagcctgaccagcgaagatagcgccgtgtacttctgtgcccggtccatcacaacagtcgtgggctgcgctatggactattggggccagggaacaagcgtgaccgtgtctagtacgcgtatccagaaccctgatcctgccgtgtaccagctgcgggatagcaagagcagcgacaagagcgtgtgtctgttcaccgacttcgacagccagaccaacgtgtcccagagcaaggactccgacgtgtacatcaccgataagtgcgtgctggacatgcggagcatggacttcaagagcaactccgccgtggcctggtccaacaagtccgatttcgcctgcgccaacgccttcaacaacagcattatccccgaggacacattcttcccaagccccgagagcagctgcgacgtgaagctggtggaaaagagcttcgagacagacaccaacctgaacttccagaacctgagcgtgatcggcttcagaatcctgctgctgaaagtggccggctttaacctgctgatgaccctgcggctgtggtccagctaa

SEQ ID NO: 8363 - DNA, 1959 bp, synthetic construct
  source 1..1959: mol_type = other DNA
atggccttaccagtgaccgccttgctcctgccgctggccttgctgctccacgccgccaggccggcatgcgtgtggaagtacgccgacgccggtaccggcggaggcggatctggcggcggaggtagcggtggcggaggatctgaattcgacatccagatgacacagagccctagcagcctgtctgccagcgtgggagacagagtgaccatcacatgcaaggccagcgaccacatcaacaactggctggcctggtatcagcagaagcctggacaggcccctaagctgctgatctacggcgctaccacactggaaacaggcgtgcccagcagattttctggcagcggctctggcaccgactacaccctgacaatatccagcctccagcctgaggacttcgccacctactactgtcagcagagctggaacaccccttggacattcggccagggcaccaagctggaaatcaagagactcgaggacctgaagaacgtgttcccacctgaggtggccgtgttcgagcctagcgaggccgagatcagccacacccagaaagccaccctcgtgtgcctggctaccggcttctaccccgaccatgtggaactgtcttggtgggtcaacggcaaagaggtgcacagcggcgtgtgtaccgacccccagccactgaaagaacagcccgccctgaacgacagccggtactgcctgagcagcagactgagagtgtccgccaccttctggcagaacccccggaaccacttcagatgccaggtgcagttctacggcctgagcgagaacgacgagtggacccaggacagagccaagcccgtgacccagatcgtgtctgccgaagcctggggcagagccgattgcggctttaccagcgagagctaccagcagggcgtgctgagcgccaccatcctgtacgagatcctgctgggcaaggccaccctgtacgccgtgctggtgtctgccctggtgctgatggctatggtcaagcggaaggacagccggggaagggccaagcgatctggatctggagcaacaaacttctcactactcaaacaagcaggtgacgtggaggagaatcccgggcctactagtgccaccatggactggatttggcgcatccttttccttgtcggcgctgctaccggcgcccattccttcgaacaagttcagcttcaacagcctggcgctgagctggtcaaacctggcgcttctgtgaagatgagctgcaaagccagcggctacgccttcagcagctactggatcaactggatgaagcagaaacccggccagggactcgaatggatcggccaaatctatcccggcgacggcgacaccaactacaacggcaagttcaagggcagagccacactgaccgccgatacctctagcagcacagcctacatgcagctgagcagcctgaccagcgaagatagcgccgtgtacttctgtgcccggtccatcacaacagtcgtgggctgcgctatggactattggggccagggaacaagcgtgaccgtgtctagtacgcgtatccagaaccctgatcctgccgtgtaccagctgcgggatagcaagagcagcgacaagagcgtgtgtctgttcaccgacttcgacagccagaccaacgtgtcccagagcaaggactccgacgtgtacatcaccgataagtgcgtgctggacatgcggagcatggacttcaagagcaactccgccgtggcctggtccaacaagtccgatttcgcctgcgccaacgccttcaacaacagcattatccccgaggacacattcttcccaagccccgagagcagctgcgacgtgaagctggtggaaaagagcttcgagacagacaccaacctgaacttccagaacctgagcgtgatcggcttcagaatcctgctgctgaaagtggccggctttaacctgctgatgaccctgcggctgtggtccagctaa

SEQ ID NO: 8364 - DNA, 1977 bp, synthetic construct
  source 1..1977: mol_type = other DNA
atggccttaccagtgaccgccttgctcctgccgctggccttgctgctccacgccgccaggccggcatgcgccaacagcttcatcttcaagtacgccgaccccgaccgcggtaccggcggaggcggatctggcggcggaggtagcggtggcggaggatctgaattcgacatccagatgacacagagccctagcagcctgtctgccagcgtgggagacagagtgaccatcacatgcaaggccagcgaccacatcaacaactggctggcctggtatcagcagaagcctggacaggcccctaagctgctgatctacggcgctaccacactggaaacaggcgtgcccagcagattttctggcagcggctctggcaccgactacaccctgacaatatccagcctccagcctgaggacttcgccacctactactgtcagcagagctggaacaccccttggacattcggccagggcaccaagctggaaatcaagagactcgaggacctgaagaacgtgttcccacctgaggtggccgtgttcgagcctagcgaggccgagatcagccacacccagaaagccaccctcgtgtgcctggctaccggcttctaccccgaccatgtggaactgtcttggtgggtcaacggcaaagaggtgcacagcggcgtgtgtaccgacccccagccactgaaagaacagcccgccctgaacgacagccggtactgcctgagcagcagactgagagtgtccgccaccttctggcagaacccccggaaccacttcagatgccaggtgcagttctacggcctgagcgagaacgacgagtggacccaggacagagccaagcccgtgacccagatcgtgtctgccgaagcctggggcagagccgattgcggctttaccagcgagagctaccagcagggcgtgctgagcgccaccatcctgtacgagatcctgctgggcaaggccaccctgtacgccgtgctggtgtctgccctggtgctgatggctatggtcaagcggaaggacagccggggaagggccaagcgatctggatctggagcaacaaacttctcactactcaaacaagcaggtgacgtggaggagaatcccgggcctactagtgccaccatggactggatttggcgcatccttttccttgtcggcgctgctaccggcgcccattccttcgaacaagttcagcttcaacagcctggcgctgagctggtcaaacctggcgcttctgtgaagatgagctgcaaagccagcggctacgccttcagcagctactggatcaactggatgaagcagaaacccggccagggactcgaatggatcggccaaatctatcccggcgacggcgacaccaactacaacggcaagttcaagggcagagccacactgaccgccgatacctctagcagcacagcctacatgcagctgagcagcctgaccagcgaagatagcgccgtgtacttctgtgcccggtccatcacaacagtcgtgggctgcgctatggactattggggccagggaacaagcgtgaccgtgtctagtacgcgtatccagaaccctgatcctgccgtgtaccagctgcgggatagcaagagcagcgacaagagcgtgtgtctgttcaccgacttcgacagccagaccaacgtgtcccagagcaaggactccgacgtgtacatcaccgataagtgcgtgctggacatgcggagcatggacttcaagagcaactccgccgtggcctggtccaacaagtccgatttcgcctgcgccaacgccttcaacaacagcattatccccgaggacacattcttcccaagccccgagagcagctgcgacgtgaagctggtggaaaagagcttcgagacagacaccaacctgaacttccagaacctgagcgtgatcggcttcagaatcctgctgctgaaagtggccggctttaacctgctgatgaccctgcggctgtggtccagctaa

SEQ ID NO: 8365 - DNA, 1974 bp, synthetic construct
  source 1..1974: mol_type = other DNA
atggccttaccagtgaccgccttgctcctgccgctggccttgctgctccacgccgccaggccggcatgcaacagcttcatcttcaagtacgccgaccccgaccgcggtaccggcggaggcggatctggcggcggaggtagcggtggcggaggatctgaattcgacatccagatgacacagagccctagcagcctgtctgccagcgtgggagacagagtgaccatcacatgcaaggccagcgaccacatcaacaactggctggcctggtatcagcagaagcctggacaggcccctaagctgctgatctacggcgctaccacactggaaacaggcgtgcccagcagattttctggcagcggctctggcaccgactacaccctgacaatatccagcctccagcctgaggacttcgccacctactactgtcagcagagctggaacaccccttggacattcggccagggcaccaagctggaaatcaagagactcgaggacctgaagaacgtgttcccacctgaggtggccgtgttcgagcctagcgaggccgagatcagccacacccagaaagccaccctcgtgtgcctggctaccggcttctaccccgaccatgtggaactgtcttggtgggtcaacggcaaagaggtgcacagcggcgtgtgtaccgacccccagccactgaaagaacagcccgccctgaacgacagccggtactgcctgagcagcagactgagagtgtccgccaccttctggcagaacccccggaaccacttcagatgccaggtgcagttctacggcctgagcgagaacgacgagtggacccaggacagagccaagcccgtgacccagatcgtgtctgccgaagcctggggcagagccgattgcggctttaccagcgagagctaccagcagggcgtgctgagcgccaccatcctgtacgagatcctgctgggcaaggccaccctgtacgccgtgctggtgtctgccctggtgctgatggctatggtcaagcggaaggacagccggggaagggccaagcgatctggatctggagcaacaaacttctcactactcaaacaagcaggtgacgtggaggagaatcccgggcctactagtgccaccatggactggatttggcgcatccttttccttgtcggcgctgctaccggcgcccattccttcgaacaagttcagcttcaacagcctggcgctgagctggtcaaacctggcgcttctgtgaagatgagctgcaaagccagcggctacgccttcagcagctactggatcaactggatgaagcagaaacccggccagggactcgaatggatcggccaaatctatcccggcgacggcgacaccaactacaacggcaagttcaagggcagagccacactgaccgccgatacctctagcagcacagcctacatgcagctgagcagcctgaccagcgaagatagcgccgtgtacttctgtgcccggtccatcacaacagtcgtgggctgcgctatggactattggggccagggaacaagcgtgaccgtgtctagtacgcgtatccagaaccctgatcctgccgtgtaccagctgcgggatagcaagagcagcgacaagagcgtgtgtctgttcaccgacttcgacagccagaccaacgtgtcccagagcaaggactccgacgtgtacatcaccgataagtgcgtgctggacatgcggagcatggacttcaagagcaactccgccgtggcctggtccaacaagtccgatttcgcctgcgccaacgccttcaacaacagcattatccccgaggacacattcttcccaagccccgagagcagctgcgacgtgaagctggtggaaaagagcttcgagacagacaccaacctgaacttccagaacctgagcgtgatcggcttcagaatcctgctgctgaaagtggccggctttaacctgctgatgaccctgcggctgtggtccagctaa

SEQ ID NO: 8366 - DNA, 1968 bp, synthetic construct
  source 1..1968: mol_type = other DNA
atggccttaccagtgaccgccttgctcctgccgctggccttgctgctccacgccgccaggccggcatgcaacagcttcatcttcaagtacgccgaccccggtaccggcggaggcggatctggcggcggaggtagcggtggcggaggatctgaattcgacatccagatgacacagagccctagcagcctgtctgccagcgtgggagacagagtgaccatcacatgcaaggccagcgaccacatcaacaactggctggcctggtatcagcagaagcctggacaggcccctaagctgctgatctacggcgctaccacactggaaacaggcgtgcccagcagattttctggcagcggctctggcaccgactacaccctgacaatatccagcctccagcctgaggacttcgccacctactactgtcagcagagctggaacaccccttggacattcggccagggcaccaagctggaaatcaagagactcgaggacctgaagaacgtgttcccacctgaggtggccgtgttcgagcctagcgaggccgagatcagccacacccagaaagccaccctcgtgtgcctggctaccggcttctaccccgaccatgtggaactgtcttggtgggtcaacggcaaagaggtgcacagcggcgtgtgtaccgacccccagccactgaaagaacagcccgccctgaacgacagccggtactgcctgagcagcagactgagagtgtccgccaccttctggcagaacccccggaaccacttcagatgccaggtgcagttctacggcctgagcgagaacgacgagtggacccaggacagagccaagcccgtgacccagatcgtgtctgccgaagcctggggcagagccgattgcggctttaccagcgagagctaccagcagggcgtgctgagcgccaccatcctgtacgagatcctgctgggcaaggccaccctgtacgccgtgctggtgtctgccctggtgctgatggctatggtcaagcggaaggacagccggggaagggccaagcgatctggatctggagcaacaaacttctcactactcaaacaagcaggtgacgtggaggagaatcccgggcctactagtgccaccatggactggatttggcgcatccttttccttgtcggcgctgctaccggcgcccattccttcgaacaagttcagcttcaacagcctggcgctgagctggtcaaacctggcgcttctgtgaagatgagctgcaaagccagcggctacgccttcagcagctactggatcaactggatgaagcagaaacccggccagggactcgaatggatcggccaaatctatcccggcgacggcgacaccaactacaacggcaagttcaagggcagagccacactgaccgccgatacctctagcagcacagcctacatgcagctgagcagcctgaccagcgaagatagcgccgtgtacttctgtgcccggtccatcacaacagtcgtgggctgcgctatggactattggggccagggaacaagcgtgaccgtgtctagtacgcgtatccagaaccctgatcctgccgtgtaccagctgcgggatagcaagagcagcgacaagagcgtgtgtctgttcaccgacttcgacagccagaccaacgtgtcccagagcaaggactccgacgtgtacatcaccgataagtgcgtgctggacatgcggagcatggacttcaagagcaactccgccgtggcctggtccaacaagtccgatttcgcctgcgccaacgccttcaacaacagcattatccccgaggacacattcttcccaagccccgagagcagctgcgacgtgaagctggtggaaaagagcttcgagacagacaccaacctgaacttccagaacctgagcgtgatcggcttcagaatcctgctgctgaaagtggccggctttaacctgctgatgaccctgcggctgtggtccagctaa

SEQ ID NO: 8367 - DNA, 1965 bp, synthetic construct
  source 1..1965: mol_type = other DNA
atggccttaccagtgaccgccttgctcctgccgctggccttgctgctccacgccgccaggccggcatgcaacagcttcatcttcaagtacgccgacggtaccggcggaggcggatctggcggcggaggtagcggtggcggaggatctgaattcgacatccagatgacacagagccctagcagcctgtctgccagcgtgggagacagagtgaccatcacatgcaaggccagcgaccacatcaacaactggctggcctggtatcagcagaagcctggacaggcccctaagctgctgatctacggcgctaccacactggaaacaggcgtgcccagcagattttctggcagcggctctggcaccgactacaccctgacaatatccagcctccagcctgaggacttcgccacctactactgtcagcagagctggaacaccccttggacattcggccagggcaccaagctggaaatcaagagactcgaggacctgaagaacgtgttcccacctgaggtggccgtgttcgagcctagcgaggccgagatcagccacacccagaaagccaccctcgtgtgcctggctaccggcttctaccccgaccatgtggaactgtcttggtgggtcaacggcaaagaggtgcacagcggcgtgtgtaccgacccccagccactgaaagaacagcccgccctgaacgacagccggtactgcctgagcagcagactgagagtgtccgccaccttctggcagaacccccggaaccacttcagatgccaggtgcagttctacggcctgagcgagaacgacgagtggacccaggacagagccaagcccgtgacccagatcgtgtctgccgaagcctggggcagagccgattgcggctttaccagcgagagctaccagcagggcgtgctgagcgccaccatcctgtacgagatcctgctgggcaaggccaccctgtacgccgtgctggtgtctgccctggtgctgatggctatggtcaagcggaaggacagccggggaagggccaagcgatctggatctggagcaacaaacttctcactactcaaacaagcaggtgacgtggaggagaatcccgggcctactagtgccaccatggactggatttggcgcatccttttccttgtcggcgctgctaccggcgcccattccttcgaacaagttcagcttcaacagcctggcgctgagctggtcaaacctggcgcttctgtgaagatgagctgcaaagccagcggctacgccttcagcagctactggatcaactggatgaagcagaaacccggccagggactcgaatggatcggccaaatctatcccggcgacggcgacaccaactacaacggcaagttcaagggcagagccacactgaccgccgatacctctagcagcacagcctacatgcagctgagcagcctgaccagcgaagatagcgccgtgtacttctgtgcccggtccatcacaacagtcgtgggctgcgctatggactattggggccagggaacaagcgtgaccgtgtctagtacgcgtatccagaaccctgatcctgccgtgtaccagctgcgggatagcaagagcagcgacaagagcgtgtgtctgttcaccgacttcgacagccagaccaacgtgtcccagagcaaggactccgacgtgtacatcaccgataagtgcgtgctggacatgcggagcatggacttcaagagcaactccgccgtggcctggtccaacaagtccgatttcgcctgcgccaacgccttcaacaacagcattatccccgaggacacattcttcccaagccccgagagcagctgcgacgtgaagctggtggaaaagagcttcgagacagacaccaacctgaacttccagaacctgagcgtgatcggcttcagaatcctgctgctgaaagtggccggctttaacctgctgatgaccctgcggctgtggtccagctaa

SEQ ID NO: 8368 - DNA, 1959 bp, synthetic construct
  source 1..1959: mol_type = other DNA
atggccttaccagtgaccgccttgctcctgccgctggccttgctgctccacgccgccaggccggcatgccccatctacaagtaccccgacggtaccggcggaggcggatctggcggcggaggtagcggtggcggaggatctgaattcgacatccagatgacacagagccctagcagcctgtctgccagcgtgggagacagagtgaccatcacatgcaaggccagcgaccacatcaacaactggctggcctggtatcagcagaagcctggacaggcccctaagctgctgatctacggcgctaccacactggaaacaggcgtgcccagcagattttctggcagcggctctggcaccgactacaccctgacaatatccagcctccagcctgaggacttcgccacctactactgtcagcagagctggaacaccccttggacattcggccagggcaccaagctggaaatcaagagactcgaggacctgaagaacgtgttcccacctgaggtggccgtgttcgagcctagcgaggccgagatcagccacacccagaaagccaccctcgtgtgcctggctaccggcttctaccccgaccatgtggaactgtcttggtgggtcaacggcaaagaggtgcacagcggcgtgtgtaccgacccccagccactgaaagaacagcccgccctgaacgacagccggtactgcctgagcagcagactgagagtgtccgccaccttctggcagaacccccggaaccacttcagatgccaggtgcagttctacggcctgagcgagaacgacgagtggacccaggacagagccaagcccgtgacccagatcgtgtctgccgaagcctggggcagagccgattgcggctttaccagcgagagctaccagcagggcgtgctgagcgccaccatcctgtacgagatcctgctgggcaaggccaccctgtacgccgtgctggtgtctgccctggtgctgatggctatggtcaagcggaaggacagccggggaagggccaagcgatctggatctggagcaacaaacttctcactactcaaacaagcaggtgacgtggaggagaatcccgggcctactagtgccaccatggactggatttggcgcatccttttccttgtcggcgctgctaccggcgcccattccttcgaacaagttcagcttcaacagcctggcgctgagctggtcaaacctggcgcttctgtgaagatgagctgcaaagccagcggctacgccttcagcagctactggatcaactggatgaagcagaaacccggccagggactcgaatggatcggccaaatctatcccggcgacggcgacaccaactacaacggcaagttcaagggcagagccacactgaccgccgatacctctagcagcacagcctacatgcagctgagcagcctgaccagcgaagatagcgccgtgtacttctgtgcccggtccatcacaacagtcgtgggctgcgctatggactattggggccagggaacaagcgtgaccgtgtctagtacgcgtatccagaaccctgatcctgccgtgtaccagctgcgggatagcaagagcagcgacaagagcgtgtgtctgttcaccgacttcgacagccagaccaacgtgtcccagagcaaggactccgacgtgtacatcaccgataagtgcgtgctggacatgcggagcatggacttcaagagcaactccgccgtggcctggtccaacaagtccgatttcgcctgcgccaacgccttcaacaacagcattatccccgaggacacattcttcccaagccccgagagcagctgcgacgtgaagctggtggaaaagagcttcgagacagacaccaacctgaacttccagaacctgagcgtgatcggcttcagaatcctgctgctgaaagtggccggctttaacctgctgatgaccctgcggctgtggtccagctaa

SEQ ID NO: 8369 - DNA, 2001 bp, synthetic construct
  source 1..2001: mol_type = other DNA
atggccttaccagtgaccgccttgctcctgccgctggccttgctgctccacgccgccaggccggcatgccgcggcaacctgaccatgagcttccacctggagatcaccgcccgccccgtgctgtggcactggggtaccggcggaggcggatctggcggcggaggtagcggtggcggaggatctgaattcgacatccagatgacacagagccctagcagcctgtctgccagcgtgggagacagagtgaccatcacatgcaaggccagcgaccacatcaacaactggctggcctggtatcagcagaagcctggacaggcccctaagctgctgatctacggcgctaccacactggaaacaggcgtgcccagcagattttctggcagcggctctggcaccgactacaccctgacaatatccagcctccagcctgaggacttcgccacctactactgtcagcagagctggaacaccccttggacattcggccagggcaccaagctggaaatcaagagactcgaggacctgaagaacgtgttcccacctgaggtggccgtgttcgagcctagcgaggccgagatcagccacacccagaaagccaccctcgtgtgcctggctaccggcttctaccccgaccatgtggaactgtcttggtgggtcaacggcaaagaggtgcacagcggcgtgtgtaccgacccccagccactgaaagaacagcccgccctgaacgacagccggtactgcctgagcagcagactgagagtgtccgccaccttctggcagaacccccggaaccacttcagatgccaggtgcagttctacggcctgagcgagaacgacgagtggacccaggacagagccaagcccgtgacccagatcgtgtctgccgaagcctggggcagagccgattgcggctttaccagcgagagctaccagcagggcgtgctgagcgccaccatcctgtacgagatcctgctgggcaaggccaccctgtacgccgtgctggtgtctgccctggtgctgatggctatggtcaagcggaaggacagccggggaagggccaagcgatctggatctggagcaacaaacttctcactactcaaacaagcaggtgacgtggaggagaatcccgggcctactagtgccaccatggactggatttggcgcatccttttccttgtcggcgctgctaccggcgcccattccttcgaacaagttcagcttcaacagcctggcgctgagctggtcaaacctggcgcttctgtgaagatgagctgcaaagccagcggctacgccttcagcagctactggatcaactggatgaagcagaaacccggccagggactcgaatggatcggccaaatctatcccggcgacggcgacaccaactacaacggcaagttcaagggcagagccacactgaccgccgatacctctagcagcacagcctacatgcagctgagcagcctgaccagcgaagatagcgccgtgtacttctgtgcccggtccatcacaacagtcgtgggctgcgctatggactattggggccagggaacaagcgtgaccgtgtctagtacgcgtatccagaaccctgatcctgccgtgtaccagctgcgggatagcaagagcagcgacaagagcgtgtgtctgttcaccgacttcgacagccagaccaacgtgtcccagagcaaggactccgacgtgtacatcaccgataagtgcgtgctggacatgcggagcatggacttcaagagcaactccgccgtggcctggtccaacaagtccgatttcgcctgcgccaacgccttcaacaacagcattatccccgaggacacattcttcccaagccccgagagcagctgcgacgtgaagctggtggaaaagagcttcgagacagacaccaacctgaacttccagaacctgagcgtgatcggcttcagaatcctgctgctgaaagtggccggctttaacctgctgatgaccctgcggctgtggtccagctaa

SEQ ID NO: 8370 - DNA, 1986 bp, synthetic construct
  source 1..1986: mol_type = other DNA
atggccttaccagtgaccgccttgctcctgccgctggccttgctgctccacgccgccaggccggcatgccgcggcaacctgaccatgagcttccacctggagatcaccgcccgccccggtaccggcggaggcggatctggcggcggaggtagcggtggcggaggatctgaattcgacatccagatgacacagagccctagcagcctgtctgccagcgtgggagacagagtgaccatcacatgcaaggccagcgaccacatcaacaactggctggcctggtatcagcagaagcctggacaggcccctaagctgctgatctacggcgctaccacactggaaacaggcgtgcccagcagattttctggcagcggctctggcaccgactacaccctgacaatatccagcctccagcctgaggacttcgccacctactactgtcagcagagctggaacaccccttggacattcggccagggcaccaagctggaaatcaagagactcgaggacctgaagaacgtgttcccacctgaggtggccgtgttcgagcctagcgaggccgagatcagccacacccagaaagccaccctcgtgtgcctggctaccggcttctaccccgaccatgtggaactgtcttggtgggtcaacggcaaagaggtgcacagcggcgtgtgtaccgacccccagccactgaaagaacagcccgccctgaacgacagccggtactgcctgagcagcagactgagagtgtccgccaccttctggcagaacccccggaaccacttcagatgccaggtgcagttctacggcctgagcgagaacgacgagtggacccaggacagagccaagcccgtgacccagatcgtgtctgccgaagcctggggcagagccgattgcggctttaccagcgagagctaccagcagggcgtgctgagcgccaccatcctgtacgagatcctgctgggcaaggccaccctgtacgccgtgctggtgtctgccctggtgctgatggctatggtcaagcggaaggacagccggggaagggccaagcgatctggatctggagcaacaaacttctcactactcaaacaagcaggtgacgtggaggagaatcccgggcctactagtgccaccatggactggatttggcgcatccttttccttgtcggcgctgctaccggcgcccattccttcgaacaagttcagcttcaacagcctggcgctgagctggtcaaacctggcgcttctgtgaagatgagctgcaaagccagcggctacgccttcagcagctactggatcaactggatgaagcagaaacccggccagggactcgaatggatcggccaaatctatcccggcgacggcgacaccaactacaacggcaagttcaagggcagagccacactgaccgccgatacctctagcagcacagcctacatgcagctgagcagcctgaccagcgaagatagcgccgtgtacttctgtgcccggtccatcacaacagtcgtgggctgcgctatggactattggggccagggaacaagcgtgaccgtgtctagtacgcgtatccagaaccctgatcctgccgtgtaccagctgcgggatagcaagagcagcgacaagagcgtgtgtctgttcaccgacttcgacagccagaccaacgtgtcccagagcaaggactccgacgtgtacatcaccgataagtgcgtgctggacatgcggagcatggacttcaagagcaactccgccgtggcctggtccaacaagtccgatttcgcctgcgccaacgccttcaacaacagcattatccccgaggacacattcttcccaagccccgagagcagctgcgacgtgaagctggtggaaaagagcttcgagacagacaccaacctgaacttccagaacctgagcgtgatcggcttcagaatcctgctgctgaaagtggccggctttaacctgctgatgaccctgcggctgtggtccagctaa

SEQ ID NO: 8371 - DNA, 1974 bp, synthetic construct
  source 1..1974: mol_type = other DNA
atggccttaccagtgaccgccttgctcctgccgctggccttgctgctccacgccgccaggccggcatgcaccatgagcttccacctggagatcaccgcccgccccggtaccggcggaggcggatctggcggcggaggtagcggtggcggaggatctgaattcgacatccagatgacacagagccctagcagcctgtctgccagcgtgggagacagagtgaccatcacatgcaaggccagcgaccacatcaacaactggctggcctggtatcagcagaagcctggacaggcccctaagctgctgatctacggcgctaccacactggaaacaggcgtgcccagcagattttctggcagcggctctggcaccgactacaccctgacaatatccagcctccagcctgaggacttcgccacctactactgtcagcagagctggaacaccccttggacattcggccagggcaccaagctggaaatcaagagactcgaggacctgaagaacgtgttcccacctgaggtggccgtgttcgagcctagcgaggccgagatcagccacacccagaaagccaccctcgtgtgcctggctaccggcttctaccccgaccatgtggaactgtcttggtgggtcaacggcaaagaggtgcacagcggcgtgtgtaccgacccccagccactgaaagaacagcccgccctgaacgacagccggtactgcctgagcagcagactgagagtgtccgccaccttctggcagaacccccggaaccacttcagatgccaggtgcagttctacggcctgagcgagaacgacgagtggacccaggacagagccaagcccgtgacccagatcgtgtctgccgaagcctggggcagagccgattgcggctttaccagcgagagctaccagcagggcgtgctgagcgccaccatcctgtacgagatcctgctgggcaaggccaccctgtacgccgtgctggtgtctgccctggtgctgatggctatggtcaagcggaaggacagccggggaagggccaagcgatctggatctggagcaacaaacttctcactactcaaacaagcaggtgacgtggaggagaatcccgggcctactagtgccaccatggactggatttggcgcatccttttccttgtcggcgctgctaccggcgcccattccttcgaacaagttcagcttcaacagcctggcgctgagctggtcaaacctggcgcttctgtgaagatgagctgcaaagccagcggctacgccttcagcagctactggatcaactggatgaagcagaaacccggccagggactcgaatggatcggccaaatctatcccggcgacggcgacaccaactacaacggcaagttcaagggcagagccacactgaccgccgatacctctagcagcacagcctacatgcagctgagcagcctgaccagcgaagatagcgccgtgtacttctgtgcccggtccatcacaacagtcgtgggctgcgctatggactattggggccagggaacaagcgtgaccgtgtctagtacgcgtatccagaaccctgatcctgccgtgtaccagctgcgggatagcaagagcagcgacaagagcgtgtgtctgttcaccgacttcgacagccagaccaacgtgtcccagagcaaggactccgacgtgtacatcaccgataagtgcgtgctggacatgcggagcatggacttcaagagcaactccgccgtggcctggtccaacaagtccgatttcgcctgcgccaacgccttcaacaacagcattatccccgaggacacattcttcccaagccccgagagcagctgcgacgtgaagctggtggaaaagagcttcgagacagacaccaacctgaacttccagaacctgagcgtgatcggcttcagaatcctgctgctgaaagtggccggctttaacctgctgatgaccctgcggctgtggtccagctaa

SEQ ID NO: 8372 - DNA, 1485 bp, synthetic construct
  source 1..1485: mol_type = other DNA
atggccttaccagtgaccgccttgctcctgccgctggccttgctgctccacgccgccaggccgagaagcgaagatcggtatggaggcagcggagacatccagatgacacagagccctagcagcctgtctgccagcgtgggagacagagtgaccatcacatgcaaggccagccaggatgtgggcacagccgtggattggtatcagcagaagcctggcaaggcccctaagctgctgatctactgggccagcacaagacacacaggcgtgcccagcagattttctggcagcggctctggcaccgacttcaccctgacaatatccagcctccagcctgaggacttcgccacctactactgccagcagtacaacagctaccctctgaccttcggccagggcaccaaggtggaaatcaaaagaggcggaggcggatctggcggcggaggtagcggtggcggaggatctgaagtgcagctggttgaatcaggtggcggcctggttcaacctggcggatctctgagactgagctgtgccgccagcggctacacctttaccgagtacacaatccactgggtccgacaggcccctggcaaaggacttgagtgggtcgccaacatcaaccccaacaatggcggcaccacctacaaccagaagttcgaggacagattcaccatcagccgggacaacagcaagaacaccctgtacctccagatgaactccctgagagccgaggacaccgccgtgtactattgtgccagaggctggaacttcgactactggggccagggaacactggtcaccgttagctctacgcgtaccacgacgccagcgccgcgaccaccaacaccggcgcccaccatcgcgtcgcagcccctgtccctgcgcccagaggcgtgccggccagcggcggggggcgcagtgcacacgagggggctggacttcgcctgtgacatctacatctgggcgcccttggccgggacttgtggggtccttctcctgtcactggttatcaccctttactgcaaacggggcagaaagaaactcctgtatatattcaaacaaccatttatgagaccagtacaaactactcaagaggaagatggctgtagctgccgatttccagaagaagaagaaggaggatgtgaactgagagtgaagttcagcaggagcgcagacgcccccgcgtaccagcagggccagaaccagctctataacgagctgaatctaggacgaagagaggagtacgatgttttggacaagagacgtggccgggaccctgagatggggggaaagccgagaaggaagaaccctcaggaaggcctgtacaatgaactgcagaaagataagatggcggaggcctacagtgagattgggatgaaaggcgagcgccggaggggcaaggggcacgatggcctttaccagggtctcagtacagccaccaaggacacctacgacgcccttcacatgcaggccctgccccctcgctaa

SEQ ID NO: 8373 - DNA, 1488 bp, synthetic construct
  source 1..1488: mol_type = other DNA
atggccttaccagtgaccgccttgctcctgccgctggccttgctgctccacgccgccaggccgagaagcgaagatcggtatcggggaggcagcggagacatccagatgacacagagccctagcagcctgtctgccagcgtgggagacagagtgaccatcacatgcaaggccagccaggatgtgggcacagccgtggattggtatcagcagaagcctggcaaggcccctaagctgctgatctactgggccagcacaagacacacaggcgtgcccagcagattttctggcagcggctctggcaccgacttcaccctgacaatatccagcctccagcctgaggacttcgccacctactactgccagcagtacaacagctaccctctgaccttcggccagggcaccaaggtggaaatcaaaagaggcggaggcggatctggcggcggaggtagcggtggcggaggatctgaagtgcagctggttgaatcaggtggcggcctggttcaacctggcggatctctgagactgagctgtgccgccagcggctacacctttaccgagtacacaatccactgggtccgacaggcccctggcaaaggacttgagtgggtcgccaacatcaaccccaacaatggcggcaccacctacaaccagaagttcgaggacagattcaccatcagccgggacaacagcaagaacaccctgtacctccagatgaactccctgagagccgaggacaccgccgtgtactattgtgccagaggctggaacttcgactactggggccagggaacactggtcaccgttagctctacgcgtaccacgacgccagcgccgcgaccaccaacaccggcgcccaccatcgcgtcgcagcccctgtccctgcgcccagaggcgtgccggccagcggcggggggcgcagtgcacacgagggggctggacttcgcctgtgacatctacatctgggcgcccttggccgggacttgtggggtccttctcctgtcactggttatcaccctttactgcaaacggggcagaaagaaactcctgtatatattcaaacaaccatttatgagaccagtacaaactactcaagaggaagatggctgtagctgccgatttccagaagaagaagaaggaggatgtgaactgagagtgaagttcagcaggagcgcagacgcccccgcgtaccagcagggccagaaccagctctataacgagctgaatctaggacgaagagaggagtacgatgttttggacaagagacgtggccgggaccctgagatggggggaaagccgagaaggaagaaccctcaggaaggcctgtacaatgaactgcagaaagataagatggcggaggcctacagtgagattgggatgaaaggcgagcgccggaggggcaaggggcacgatggcctttaccagggtctcagtacagccaccaaggacacctacgacgcccttcacatgcaggccctgccccctcgctaa

SEQ ID NO: 8374 - DNA, 1491 bp, synthetic construct
  source 1..1491: mol_type = other DNA
atggccttaccagtgaccgccttgctcctgccgctggccttgctgctccacgccgccaggccgcgcagcgaggaccgctaccgcaacggaggcagcggagacatccagatgacacagagccctagcagcctgtctgccagcgtgggagacagagtgaccatcacatgcaaggccagccaggatgtgggcacagccgtggattggtatcagcagaagcctggcaaggcccctaagctgctgatctactgggccagcacaagacacacaggcgtgcccagcagattttctggcagcggctctggcaccgacttcaccctgacaatatccagcctccagcctgaggacttcgccacctactactgccagcagtacaacagctaccctctgaccttcggccagggcaccaaggtggaaatcaaaagaggcggaggcggatctggcggcggaggtagcggtggcggaggatctgaagtgcagctggttgaatcaggtggcggcctggttcaacctggcggatctctgagactgagctgtgccgccagcggctacacctttaccgagtacacaatccactgggtccgacaggcccctggcaaaggacttgagtgggtcgccaacatcaaccccaacaatggcggcaccacctacaaccagaagttcgaggacagattcaccatcagccgggacaacagcaagaacaccctgtacctccagatgaactccctgagagccgaggacaccgccgtgtactattgtgccagaggctggaacttcgactactggggccagggaacactggtcaccgttagctctacgcgtaccacgacgccagcgccgcgaccaccaacaccggcgcccaccatcgcgtcgcagcccctgtccctgcgcccagaggcgtgccggccagcggcggggggcgcagtgcacacgagggggctggacttcgcctgtgacatctacatctgggcgcccttggccgggacttgtggggtccttctcctgtcactggttatcaccctttactgcaaacggggcagaaagaaactcctgtatatattcaaacaaccatttatgagaccagtacaaactactcaagaggaagatggctgtagctgccgatttccagaagaagaagaaggaggatgtgaactgagagtgaagttcagcaggagcgcagacgcccccgcgtaccagcagggccagaaccagctctataacgagctgaatctaggacgaagagaggagtacgatgttttggacaagagacgtggccgggaccctgagatggggggaaagccgagaaggaagaaccctcaggaaggcctgtacaatgaactgcagaaagataagatggcggaggcctacagtgagattgggatgaaaggcgagcgccggaggggcaaggggcacgatggcctttaccagggtctcagtacagccaccaaggacacctacgacgcccttcacatgcaggccctgccccctcgctaa

SEQ ID NO: 8375 - DNA, 1494 bp, synthetic construct
  source 1..1494: mol_type = other DNA
atggccttaccagtgaccgccttgctcctgccgctggccttgctgctccacgccgccaggccgcgcagcgaggaccgctaccgcaaccccggaggcagcggagacatccagatgacacagagccctagcagcctgtctgccagcgtgggagacagagtgaccatcacatgcaaggccagccaggatgtgggcacagccgtggattggtatcagcagaagcctggcaaggcccctaagctgctgatctactgggccagcacaagacacacaggcgtgcccagcagattttctggcagcggctctggcaccgacttcaccctgacaatatccagcctccagcctgaggacttcgccacctactactgccagcagtacaacagctaccctctgaccttcggccagggcaccaaggtggaaatcaaaagaggcggaggcggatctggcggcggaggtagcggtggcggaggatctgaagtgcagctggttgaatcaggtggcggcctggttcaacctggcggatctctgagactgagctgtgccgccagcggctacacctttaccgagtacacaatccactgggtccgacaggcccctggcaaaggacttgagtgggtcgccaacatcaaccccaacaatggcggcaccacctacaaccagaagttcgaggacagattcaccatcagccgggacaacagcaagaacaccctgtacctccagatgaactccctgagagccgaggacaccgccgtgtactattgtgccagaggctggaacttcgactactggggccagggaacactggtcaccgttagctctacgcgtaccacgacgccagcgccgcgaccaccaacaccggcgcccaccatcgcgtcgcagcccctgtccctgcgcccagaggcgtgccggccagcggcggggggcgcagtgcacacgagggggctggacttcgcctgtgacatctacatctgggcgcccttggccgggacttgtggggtccttctcctgtcactggttatcaccctttactgcaaacggggcagaaagaaactcctgtatatattcaaacaaccatttatgagaccagtacaaactactcaagaggaagatggctgtagctgccgatttccagaagaagaagaaggaggatgtgaactgagagtgaagttcagcaggagcgcagacgcccccgcgtaccagcagggccagaaccagctctataacgagctgaatctaggacgaagagaggagtacgatgttttggacaagagacgtggccgggaccctgagatggggggaaagccgagaaggaagaaccctcaggaaggcctgtacaatgaactgcagaaagataagatggcggaggcctacagtgagattgggatgaaaggcgagcgccggaggggcaaggggcacgatggcctttaccagggtctcagtacagccaccaaggacacctacgacgcccttcacatgcaggccctgccccctcgctaa

SEQ ID NO: 8376 - DNA, 1497 bp, synthetic construct
  source 1..1497: mol_type = other DNA
atggccttaccagtgaccgccttgctcctgccgctggccttgctgctccacgccgccaggccgcgcagcgaggaccgctaccgcaaccccaagggaggcagcggagacatccagatgacacagagccctagcagcctgtctgccagcgtgggagacagagtgaccatcacatgcaaggccagccaggatgtgggcacagccgtggattggtatcagcagaagcctggcaaggcccctaagctgctgatctactgggccagcacaagacacacaggcgtgcccagcagattttctggcagcggctctggcaccgacttcaccctgacaatatccagcctccagcctgaggacttcgccacctactactgccagcagtacaacagctaccctctgaccttcggccagggcaccaaggtggaaatcaaaagaggcggaggcggatctggcggcggaggtagcggtggcggaggatctgaagtgcagctggttgaatcaggtggcggcctggttcaacctggcggatctctgagactgagctgtgccgccagcggctacacctttaccgagtacacaatccactgggtccgacaggcccctggcaaaggacttgagtgggtcgccaacatcaaccccaacaatggcggcaccacctacaaccagaagttcgaggacagattcaccatcagccgggacaacagcaagaacaccctgtacctccagatgaactccctgagagccgaggacaccgccgtgtactattgtgccagaggctggaacttcgactactggggccagggaacactggtcaccgttagctctacgcgtaccacgacgccagcgccgcgaccaccaacaccggcgcccaccatcgcgtcgcagcccctgtccctgcgcccagaggcgtgccggccagcggcggggggcgcagtgcacacgagggggctggacttcgcctgtgacatctacatctgggcgcccttggccgggacttgtggggtccttctcctgtcactggttatcaccctttactgcaaacggggcagaaagaaactcctgtatatattcaaacaaccatttatgagaccagtacaaactactcaagaggaagatggctgtagctgccgatttccagaagaagaagaaggaggatgtgaactgagagtgaagttcagcaggagcgcagacgcccccgcgtaccagcagggccagaaccagctctataacgagctgaatctaggacgaagagaggagtacgatgttttggacaagagacgtggccgggaccctgagatggggggaaagccgagaaggaagaaccctcaggaaggcctgtacaatgaactgcagaaagataagatggcggaggcctacagtgagattgggatgaaaggcgagcgccggaggggcaaggggcacgatggcctttaccagggtctcagtacagccaccaaggacacctacgacgcccttcacatgcaggccctgccccctcgctaa

SEQ ID NO: 8377 - DNA, 1500 bp, synthetic construct
  source 1..1500: mol_type = other DNA
atggccttaccagtgaccgccttgctcctgccgctggccttgctgctccacgccgccaggccgcgcagcgaggaccgctaccgcaaccccaagggcggaggcagcggagacatccagatgacacagagccctagcagcctgtctgccagcgtgggagacagagtgaccatcacatgcaaggccagccaggatgtgggcacagccgtggattggtatcagcagaagcctggcaaggcccctaagctgctgatctactgggccagcacaagacacacaggcgtgcccagcagattttctggcagcggctctggcaccgacttcaccctgacaatatccagcctccagcctgaggacttcgccacctactactgccagcagtacaacagctaccctctgaccttcggccagggcaccaaggtggaaatcaaaagaggcggaggcggatctggcggcggaggtagcggtggcggaggatctgaagtgcagctggttgaatcaggtggcggcctggttcaacctggcggatctctgagactgagctgtgccgccagcggctacacctttaccgagtacacaatccactgggtccgacaggcccctggcaaaggacttgagtgggtcgccaacatcaaccccaacaatggcggcaccacctacaaccagaagttcgaggacagattcaccatcagccgggacaacagcaagaacaccctgtacctccagatgaactccctgagagccgaggacaccgccgtgtactattgtgccagaggctggaacttcgactactggggccagggaacactggtcaccgttagctctacgcgtaccacgacgccagcgccgcgaccaccaacaccggcgcccaccatcgcgtcgcagcccctgtccctgcgcccagaggcgtgccggccagcggcggggggcgcagtgcacacgagggggctggacttcgcctgtgacatctacatctgggcgcccttggccgggacttgtggggtccttctcctgtcactggttatcaccctttactgcaaacggggcagaaagaaactcctgtatatattcaaacaaccatttatgagaccagtacaaactactcaagaggaagatggctgtagctgccgatttccagaagaagaagaaggaggatgtgaactgagagtgaagttcagcaggagcgcagacgcccccgcgtaccagcagggccagaaccagctctataacgagctgaatctaggacgaagagaggagtacgatgttttggacaagagacgtggccgggaccctgagatggggggaaagccgagaaggaagaaccctcaggaaggcctgtacaatgaactgcagaaagataagatggcggaggcctacagtgagattgggatgaaaggcgagcgccggaggggcaaggggcacgatggcctttaccagggtctcagtacagccaccaaggacacctacgacgcccttcacatgcaggccctgccccctcgctaa

SEQ ID NO: 8378 - DNA, 1503 bp, synthetic construct
  source 1..1503: mol_type = other DNA
atggccttaccagtgaccgccttgctcctgccgctggccttgctgctccacgccgccaggccgcgcagcgaggaccgctaccgcaaccccaagggcagcggaggcagcggagacatccagatgacacagagccctagcagcctgtctgccagcgtgggagacagagtgaccatcacatgcaaggccagccaggatgtgggcacagccgtggattggtatcagcagaagcctggcaaggcccctaagctgctgatctactgggccagcacaagacacacaggcgtgcccagcagattttctggcagcggctctggcaccgacttcaccctgacaatatccagcctccagcctgaggacttcgccacctactactgccagcagtacaacagctaccctctgaccttcggccagggcaccaaggtggaaatcaaaagaggcggaggcggatctggcggcggaggtagcggtggcggaggatctgaagtgcagctggttgaatcaggtggcggcctggttcaacctggcggatctctgagactgagctgtgccgccagcggctacacctttaccgagtacacaatccactgggtccgacaggcccctggcaaaggacttgagtgggtcgccaacatcaaccccaacaatggcggcaccacctacaaccagaagttcgaggacagattcaccatcagccgggacaacagcaagaacaccctgtacctccagatgaactccctgagagccgaggacaccgccgtgtactattgtgccagaggctggaacttcgactactggggccagggaacactggtcaccgttagctctacgcgtaccacgacgccagcgccgcgaccaccaacaccggcgcccaccatcgcgtcgcagcccctgtccctgcgcccagaggcgtgccggccagcggcggggggcgcagtgcacacgagggggctggacttcgcctgtgacatctacatctgggcgcccttggccgggacttgtggggtccttctcctgtcactggttatcaccctttactgcaaacggggcagaaagaaactcctgtatatattcaaacaaccatttatgagaccagtacaaactactcaagaggaagatggctgtagctgccgatttccagaagaagaagaaggaggatgtgaactgagagtgaagttcagcaggagcgcagacgcccccgcgtaccagcagggccagaaccagctctataacgagctgaatctaggacgaagagaggagtacgatgttttggacaagagacgtggccgggaccctgagatggggggaaagccgagaaggaagaaccctcaggaaggcctgtacaatgaactgcagaaagataagatggcggaggcctacagtgagattgggatgaaaggcgagcgccggaggggcaaggggcacgatggcctttaccagggtctcagtacagccaccaaggacacctacgacgcccttcacatgcaggccctgccccctcgctaa

SEQ ID NO: 8379 - DNA, 1506 bp, synthetic construct
  source 1..1506: mol_type = other DNA
atggccttaccagtgaccgccttgctcctgccgctggccttgctgctccacgccgccaggccgcgcagcgaggaccgctaccgcaaccccaagggcagcgccggaggcagcggagacatccagatgacacagagccctagcagcctgtctgccagcgtgggagacagagtgaccatcacatgcaaggccagccaggatgtgggcacagccgtggattggtatcagcagaagcctggcaaggcccctaagctgctgatctactgggccagcacaagacacacaggcgtgcccagcagattttctggcagcggctctggcaccgacttcaccctgacaatatccagcctccagcctgaggacttcgccacctactactgccagcagtacaacagctaccctctgaccttcggccagggcaccaaggtggaaatcaaaagaggcggaggcggatctggcggcggaggtagcggtggcggaggatctgaagtgcagctggttgaatcaggtggcggcctggttcaacctggcggatctctgagactgagctgtgccgccagcggctacacctttaccgagtacacaatccactgggtccgacaggcccctggcaaaggacttgagtgggtcgccaacatcaaccccaacaatggcggcaccacctacaaccagaagttcgaggacagattcaccatcagccgggacaacagcaagaacaccctgtacctccagatgaactccctgagagccgaggacaccgccgtgtactattgtgccagaggctggaacttcgactactggggccagggaacactggtcaccgttagctctacgcgtaccacgacgccagcgccgcgaccaccaacaccggcgcccaccatcgcgtcgcagcccctgtccctgcgcccagaggcgtgccggccagcggcggggggcgcagtgcacacgagggggctggacttcgcctgtgacatctacatctgggcgcccttggccgggacttgtggggtccttctcctgtcactggttatcaccctttactgcaaacggggcagaaagaaactcctgtatatattcaaacaaccatttatgagaccagtacaaactactcaagaggaagatggctgtagctgccgatttccagaagaagaagaaggaggatgtgaactgagagtgaagttcagcaggagcgcagacgcccccgcgtaccagcagggccagaaccagctctataacgagctgaatctaggacgaagagaggagtacgatgttttggacaagagacgtggccgggaccctgagatggggggaaagccgagaaggaagaaccctcaggaaggcctgtacaatgaactgcagaaagataagatggcggaggcctacagtgagattgggatgaaaggcgagcgccggaggggcaaggggcacgatggcctttaccagggtctcagtacagccaccaaggacacctacgacgcccttcacatgcaggccctgccccctcgctaa

SEQ ID NO: 8380 - DNA, 1509 bp, synthetic construct
  source 1..1509: mol_type = other DNA
atggccttaccagtgaccgccttgctcctgccgctggccttgctgctccacgccgccaggccgcgcagcgaggaccgctaccgcaaccccaagggcagcgcctgcggaggcagcggagacatccagatgacacagagccctagcagcctgtctgccagcgtgggagacagagtgaccatcacatgcaaggccagccaggatgtgggcacagccgtggattggtatcagcagaagcctggcaaggcccctaagctgctgatctactgggccagcacaagacacacaggcgtgcccagcagattttctggcagcggctctggcaccgacttcaccctgacaatatccagcctccagcctgaggacttcgccacctactactgccagcagtacaacagctaccctctgaccttcggccagggcaccaaggtggaaatcaaaagaggcggaggcggatctggcggcggaggtagcggtggcggaggatctgaagtgcagctggttgaatcaggtggcggcctggttcaacctggcggatctctgagactgagctgtgccgccagcggctacacctttaccgagtacacaatccactgggtccgacaggcccctggcaaaggacttgagtgggtcgccaacatcaaccccaacaatggcggcaccacctacaaccagaagttcgaggacagattcaccatcagccgggacaacagcaagaacaccctgtacctccagatgaactccctgagagccgaggacaccgccgtgtactattgtgccagaggctggaacttcgactactggggccagggaacactggtcaccgttagctctacgcgtaccacgacgccagcgccgcgaccaccaacaccggcgcccaccatcgcgtcgcagcccctgtccctgcgcccagaggcgtgccggccagcggcggggggcgcagtgcacacgagggggctggacttcgcctgtgacatctacatctgggcgcccttggccgggacttgtggggtccttctcctgtcactggttatcaccctttactgcaaacggggcagaaagaaactcctgtatatattcaaacaaccatttatgagaccagtacaaactactcaagaggaagatggctgtagctgccgatttccagaagaagaagaaggaggatgtgaactgagagtgaagttcagcaggagcgcagacgcccccgcgtaccagcagggccagaaccagctctataacgagctgaatctaggacgaagagaggagtacgatgttttggacaagagacgtggccgggaccctgagatggggggaaagccgagaaggaagaaccctcaggaaggcctgtacaatgaactgcagaaagataagatggcggaggcctacagtgagattgggatgaaaggcgagcgccggaggggcaaggggcacgatggcctttaccagggtctcagtacagccaccaaggacacctacgacgcccttcacatgcaggccctgccccctcgctaa

SEQ ID NO: 8381 - DNA, 1512 bp, synthetic construct
  source 1..1512: mol_type = other DNA
atggccttaccagtgaccgccttgctcctgccgctggccttgctgctccacgccgccaggccgcgcagcgaggaccgctaccgcaaccccaagggcagcgcctgcaagggaggcagcggagacatccagatgacacagagccctagcagcctgtctgccagcgtgggagacagagtgaccatcacatgcaaggccagccaggatgtgggcacagccgtggattggtatcagcagaagcctggcaaggcccctaagctgctgatctactgggccagcacaagacacacaggcgtgcccagcagattttctggcagcggctctggcaccgacttcaccctgacaatatccagcctccagcctgaggacttcgccacctactactgccagcagtacaacagctaccctctgaccttcggccagggcaccaaggtggaaatcaaaagaggcggaggcggatctggcggcggaggtagcggtggcggaggatctgaagtgcagctggttgaatcaggtggcggcctggttcaacctggcggatctctgagactgagctgtgccgccagcggctacacctttaccgagtacacaatccactgggtccgacaggcccctggcaaaggacttgagtgggtcgccaacatcaaccccaacaatggcggcaccacctacaaccagaagttcgaggacagattcaccatcagccgggacaacagcaagaacaccctgtacctccagatgaactccctgagagccgaggacaccgccgtgtactattgtgccagaggctggaacttcgactactggggccagggaacactggtcaccgttagctctacgcgtaccacgacgccagcgccgcgaccaccaacaccggcgcccaccatcgcgtcgcagcccctgtccctgcgcccagaggcgtgccggccagcggcggggggcgcagtgcacacgagggggctggacttcgcctgtgacatctacatctgggcgcccttggccgggacttgtggggtccttctcctgtcactggttatcaccctttactgcaaacggggcagaaagaaactcctgtatatattcaaacaaccatttatgagaccagtacaaactactcaagaggaagatggctgtagctgccgatttccagaagaagaagaaggaggatgtgaactgagagtgaagttcagcaggagcgcagacgcccccgcgtaccagcagggccagaaccagctctataacgagctgaatctaggacgaagagaggagtacgatgttttggacaagagacgtggccgggaccctgagatggggggaaagccgagaaggaagaaccctcaggaaggcctgtacaatgaactgcagaaagataagatggcggaggcctacagtgagattgggatgaaaggcgagcgccggaggggcaaggggcacgatggcctttaccagggtctcagtacagccaccaaggacacctacgacgcccttcacatgcaggccctgccccctcgctaa

SEQ ID NO: 8382 - DNA, 1512 bp, synthetic construct
  source 1..1512: mol_type = other DNA
atggccttaccagtgaccgccttgctcctgccgctggccttgctgctccacgccgccaggccgcgcagcgaggaccgctaccgcaaccccaagggcagcgcctgcagcggaggcagcggagacatccagatgacacagagccctagcagcctgtctgccagcgtgggagacagagtgaccatcacatgcaaggccagccaggatgtgggcacagccgtggattggtatcagcagaagcctggcaaggcccctaagctgctgatctactgggccagcacaagacacacaggcgtgcccagcagattttctggcagcggctctggcaccgacttcaccctgacaatatccagcctccagcctgaggacttcgccacctactactgccagcagtacaacagctaccctctgaccttcggccagggcaccaaggtggaaatcaaaagaggcggaggcggatctggcggcggaggtagcggtggcggaggatctgaagtgcagctggttgaatcaggtggcggcctggttcaacctggcggatctctgagactgagctgtgccgccagcggctacacctttaccgagtacacaatccactgggtccgacaggcccctggcaaaggacttgagtgggtcgccaacatcaaccccaacaatggcggcaccacctacaaccagaagttcgaggacagattcaccatcagccgggacaacagcaagaacaccctgtacctccagatgaactccctgagagccgaggacaccgccgtgtactattgtgccagaggctggaacttcgactactggggccagggaacactggtcaccgttagctctacgcgtaccacgacgccagcgccgcgaccaccaacaccggcgcccaccatcgcgtcgcagcccctgtccctgcgcccagaggcgtgccggccagcggcggggggcgcagtgcacacgagggggctggacttcgcctgtgacatctacatctgggcgcccttggccgggacttgtggggtccttctcctgtcactggttatcaccctttactgcaaacggggcagaaagaaactcctgtatatattcaaacaaccatttatgagaccagtacaaactactcaagaggaagatggctgtagctgccgatttccagaagaagaagaaggaggatgtgaactgagagtgaagttcagcaggagcgcagacgcccccgcgtaccagcagggccagaaccagctctataacgagctgaatctaggacgaagagaggagtacgatgttttggacaagagacgtggccgggaccctgagatggggggaaagccgagaaggaagaaccctcaggaaggcctgtacaatgaactgcagaaagataagatggcggaggcctacagtgagattgggatgaaaggcgagcgccggaggggcaaggggcacgatggcctttaccagggtctcagtacagccaccaaggacacctacgacgcccttcacatgcaggccctgccccctcgctaa

SEQ ID NO: 8383 - DNA, 1485 bp, synthetic construct
  source 1..1485: mol_type = other DNA
atggccttaccagtgaccgccttgctcctgccgctggccttgctgctccacgccgccaggccgcgcagcgaggaccactacggaggcagcggagacatccagatgacacagagccctagcagcctgtctgccagcgtgggagacagagtgaccatcacatgcaaggccagccaggatgtgggcacagccgtggattggtatcagcagaagcctggcaaggcccctaagctgctgatctactgggccagcacaagacacacaggcgtgcccagcagattttctggcagcggctctggcaccgacttcaccctgacaatatccagcctccagcctgaggacttcgccacctactactgccagcagtacaacagctaccctctgaccttcggccagggcaccaaggtggaaatcaaaagaggcggaggcggatctggcggcggaggtagcggtggcggaggatctgaagtgcagctggttgaatcaggtggcggcctggttcaacctggcggatctctgagactgagctgtgccgccagcggctacacctttaccgagtacacaatccactgggtccgacaggcccctggcaaaggacttgagtgggtcgccaacatcaaccccaacaatggcggcaccacctacaaccagaagttcgaggacagattcaccatcagccgggacaacagcaagaacaccctgtacctccagatgaactccctgagagccgaggacaccgccgtgtactattgtgccagaggctggaacttcgactactggggccagggaacactggtcaccgttagctctacgcgtaccacgacgccagcgccgcgaccaccaacaccggcgcccaccatcgcgtcgcagcccctgtccctgcgcccagaggcgtgccggccagcggcggggggcgcagtgcacacgagggggctggacttcgcctgtgacatctacatctgggcgcccttggccgggacttgtggggtccttctcctgtcactggttatcaccctttactgcaaacggggcagaaagaaactcctgtatatattcaaacaaccatttatgagaccagtacaaactactcaagaggaagatggctgtagctgccgatttccagaagaagaagaaggaggatgtgaactgagagtgaagttcagcaggagcgcagacgcccccgcgtaccagcagggccagaaccagctctataacgagctgaatctaggacgaagagaggagtacgatgttttggacaagagacgtggccgggaccctgagatggggggaaagccgagaaggaagaaccctcaggaaggcctgtacaatgaactgcagaaagataagatggcggaggcctacagtgagattgggatgaaaggcgagcgccggaggggcaaggggcacgatggcctttaccagggtctcagtacagccaccaaggacacctacgacgcccttcacatgcaggccctgccccctcgctaa

SEQ ID NO: 8384 - DNA, 1485 bp, synthetic construct
  source 1..1485: mol_type = other DNA
atggccttaccagtgaccgccttgctcctgccgctggccttgctgctccacgccgccaggccgcgcagcgagagccgctacggaggcagcggagacatccagatgacacagagccctagcagcctgtctgccagcgtgggagacagagtgaccatcacatgcaaggccagccaggatgtgggcacagccgtggattggtatcagcagaagcctggcaaggcccctaagctgctgatctactgggccagcacaagacacacaggcgtgcccagcagattttctggcagcggctctggcaccgacttcaccctgacaatatccagcctccagcctgaggacttcgccacctactactgccagcagtacaacagctaccctctgaccttcggccagggcaccaaggtggaaatcaaaagaggcggaggcggatctggcggcggaggtagcggtggcggaggatctgaagtgcagctggttgaatcaggtggcggcctggttcaacctggcggatctctgagactgagctgtgccgccagcggctacacctttaccgagtacacaatccactgggtccgacaggcccctggcaaaggacttgagtgggtcgccaacatcaaccccaacaatggcggcaccacctacaaccagaagttcgaggacagattcaccatcagccgggacaacagcaagaacaccctgtacctccagatgaactccctgagagccgaggacaccgccgtgtactattgtgccagaggctggaacttcgactactggggccagggaacactggtcaccgttagctctacgcgtaccacgacgccagcgccgcgaccaccaacaccggcgcccaccatcgcgtcgcagcccctgtccctgcgcccagaggcgtgccggccagcggcggggggcgcagtgcacacgagggggctggacttcgcctgtgacatctacatctgggcgcccttggccgggacttgtggggtccttctcctgtcactggttatcaccctttactgcaaacggggcagaaagaaactcctgtatatattcaaacaaccatttatgagaccagtacaaactactcaagaggaagatggctgtagctgccgatttccagaagaagaagaaggaggatgtgaactgagagtgaagttcagcaggagcgcagacgcccccgcgtaccagcagggccagaaccagctctataacgagctgaatctaggacgaagagaggagtacgatgttttggacaagagacgtggccgggaccctgagatggggggaaagccgagaaggaagaaccctcaggaaggcctgtacaatgaactgcagaaagataagatggcggaggcctacagtgagattgggatgaaaggcgagcgccggaggggcaaggggcacgatggcctttaccagggtctcagtacagccaccaaggacacctacgacgcccttcacatgcaggccctgccccctcgctaa

SEQ ID NO: 8385 - DNA, 1485 bp, synthetic construct
  source 1..1485: mol_type = other DNA
atggccttaccagtgaccgccttgctcctgccgctggccttgctgctccacgccgccaggccgcgcagcgagaaccgctacggaggcagcggagacatccagatgacacagagccctagcagcctgtctgccagcgtgggagacagagtgaccatcacatgcaaggccagccaggatgtgggcacagccgtggattggtatcagcagaagcctggcaaggcccctaagctgctgatctactgggccagcacaagacacacaggcgtgcccagcagattttctggcagcggctctggcaccgacttcaccctgacaatatccagcctccagcctgaggacttcgccacctactactgccagcagtacaacagctaccctctgaccttcggccagggcaccaaggtggaaatcaaaagaggcggaggcggatctggcggcggaggtagcggtggcggaggatctgaagtgcagctggttgaatcaggtggcggcctggttcaacctggcggatctctgagactgagctgtgccgccagcggctacacctttaccgagtacacaatccactgggtccgacaggcccctggcaaaggacttgagtgggtcgccaacatcaaccccaacaatggcggcaccacctacaaccagaagttcgaggacagattcaccatcagccgggacaacagcaagaacaccctgtacctccagatgaactccctgagagccgaggacaccgccgtgtactattgtgccagaggctggaacttcgactactggggccagggaacactggtcaccgttagctctacgcgtaccacgacgccagcgccgcgaccaccaacaccggcgcccaccatcgcgtcgcagcccctgtccctgcgcccagaggcgtgccggccagcggcggggggcgcagtgcacacgagggggctggacttcgcctgtgacatctacatctgggcgcccttggccgggacttgtggggtccttctcctgtcactggttatcaccctttactgcaaacggggcagaaagaaactcctgtatatattcaaacaaccatttatgagaccagtacaaactactcaagaggaagatggctgtagctgccgatttccagaagaagaagaaggaggatgtgaactgagagtgaagttcagcaggagcgcagacgcccccgcgtaccagcagggccagaaccagctctataacgagctgaatctaggacgaagagaggagtacgatgttttggacaagagacgtggccgggaccctgagatggggggaaagccgagaaggaagaaccctcaggaaggcctgtacaatgaactgcagaaagataagatggcggaggcctacagtgagattgggatgaaaggcgagcgccggaggggcaaggggcacgatggcctttaccagggtctcagtacagccaccaaggacacctacgacgcccttcacatgcaggccctgccccctcgctaa

SEQ ID NO: 8386 - DNA, 1485 bp, synthetic construct
  source 1..1485: mol_type = other DNA
atggccttaccagtgaccgccttgctcctgccgctggccttgctgctccacgccgccaggccgcgcagcgagggccgctacggaggcagcggagacatccagatgacacagagccctagcagcctgtctgccagcgtgggagacagagtgaccatcacatgcaaggccagccaggatgtgggcacagccgtggattggtatcagcagaagcctggcaaggcccctaagctgctgatctactgggccagcacaagacacacaggcgtgcccagcagattttctggcagcggctctggcaccgacttcaccctgacaatatccagcctccagcctgaggacttcgccacctactactgccagcagtacaacagctaccctctgaccttcggccagggcaccaaggtggaaatcaaaagaggcggaggcggatctggcggcggaggtagcggtggcggaggatctgaagtgcagctggttgaatcaggtggcggcctggttcaacctggcggatctctgagactgagctgtgccgccagcggctacacctttaccgagtacacaatccactgggtccgacaggcccctggcaaaggacttgagtgggtcgccaacatcaaccccaacaatggcggcaccacctacaaccagaagttcgaggacagattcaccatcagccgggacaacagcaagaacaccctgtacctccagatgaactccctgagagccgaggacaccgccgtgtactattgtgccagaggctggaacttcgactactggggccagggaacactggtcaccgttagctctacgcgtaccacgacgccagcgccgcgaccaccaacaccggcgcccaccatcgcgtcgcagcccctgtccctgcgcccagaggcgtgccggccagcggcggggggcgcagtgcacacgagggggctggacttcgcctgtgacatctacatctgggcgcccttggccgggacttgtggggtccttctcctgtcactggttatcaccctttactgcaaacggggcagaaagaaactcctgtatatattcaaacaaccatttatgagaccagtacaaactactcaagaggaagatggctgtagctgccgatttccagaagaagaagaaggaggatgtgaactgagagtgaagttcagcaggagcgcagacgcccccgcgtaccagcagggccagaaccagctctataacgagctgaatctaggacgaagagaggagtacgatgttttggacaagagacgtggccgggaccctgagatggggggaaagccgagaaggaagaaccctcaggaaggcctgtacaatgaactgcagaaagataagatggcggaggcctacagtgagattgggatgaaaggcgagcgccggaggggcaaggggcacgatggcctttaccagggtctcagtacagccaccaaggacacctacgacgcccttcacatgcaggccctgccccctcgctaa

SEQ ID NO: 8387 - DNA, 1485 bp, synthetic construct
  source 1..1485: mol_type = other DNA
atggccttaccagtgaccgccttgctcctgccgctggccttgctgctccacgccgccaggccgcgcagcgaggcccgctacggaggcagcggagacatccagatgacacagagccctagcagcctgtctgccagcgtgggagacagagtgaccatcacatgcaaggccagccaggatgtgggcacagccgtggattggtatcagcagaagcctggcaaggcccctaagctgctgatctactgggccagcacaagacacacaggcgtgcccagcagattttctggcagcggctctggcaccgacttcaccctgacaatatccagcctccagcctgaggacttcgccacctactactgccagcagtacaacagctaccctctgaccttcggccagggcaccaaggtggaaatcaaaagaggcggaggcggatctggcggcggaggtagcggtggcggaggatctgaagtgcagctggttgaatcaggtggcggcctggttcaacctggcggatctctgagactgagctgtgccgccagcggctacacctttaccgagtacacaatccactgggtccgacaggcccctggcaaaggacttgagtgggtcgccaacatcaaccccaacaatggcggcaccacctacaaccagaagttcgaggacagattcaccatcagccgggacaacagcaagaacaccctgtacctccagatgaactccctgagagccgaggacaccgccgtgtactattgtgccagaggctggaacttcgactactggggccagggaacactggtcaccgttagctctacgcgtaccacgacgccagcgccgcgaccaccaacaccggcgcccaccatcgcgtcgcagcccctgtccctgcgcccagaggcgtgccggccagcggcggggggcgcagtgcacacgagggggctggacttcgcctgtgacatctacatctgggcgcccttggccgggacttgtggggtccttctcctgtcactggttatcaccctttactgcaaacggggcagaaagaaactcctgtatatattcaaacaaccatttatgagaccagtacaaactactcaagaggaagatggctgtagctgccgatttccagaagaagaagaaggaggatgtgaactgagagtgaagttcagcaggagcgcagacgcccccgcgtaccagcagggccagaaccagctctataacgagctgaatctaggacgaagagaggagtacgatgttttggacaagagacgtggccgggaccctgagatggggggaaagccgagaaggaagaaccctcaggaaggcctgtacaatgaactgcagaaagataagatggcggaggcctacagtgagattgggatgaaaggcgagcgccggaggggcaaggggcacgatggcctttaccagggtctcagtacagccaccaaggacacctacgacgcccttcacatgcaggccctgccccctcgctaa

SEQ ID NO: 8388 - DNA, 1485 bp, synthetic construct
  source 1..1485: mol_type = other DNA
atggccttaccagtgaccgccttgctcctgccgctggccttgctgctccacgccgccaggccgcgcagcgagcagcgctacggaggcagcggagacatccagatgacacagagccctagcagcctgtctgccagcgtgggagacagagtgaccatcacatgcaaggccagccaggatgtgggcacagccgtggattggtatcagcagaagcctggcaaggcccctaagctgctgatctactgggccagcacaagacacacaggcgtgcccagcagattttctggcagcggctctggcaccgacttcaccctgacaatatccagcctccagcctgaggacttcgccacctactactgccagcagtacaacagctaccctctgaccttcggccagggcaccaaggtggaaatcaaaagaggcggaggcggatctggcggcggaggtagcggtggcggaggatctgaagtgcagctggttgaatcaggtggcggcctggttcaacctggcggatctctgagactgagctgtgccgccagcggctacacctttaccgagtacacaatccactgggtccgacaggcccctggcaaaggacttgagtgggtcgccaacatcaaccccaacaatggcggcaccacctacaaccagaagttcgaggacagattcaccatcagccgggacaacagcaagaacaccctgtacctccagatgaactccctgagagccgaggacaccgccgtgtactattgtgccagaggctggaacttcgactactggggccagggaacactggtcaccgttagctctacgcgtaccacgacgccagcgccgcgaccaccaacaccggcgcccaccatcgcgtcgcagcccctgtccctgcgcccagaggcgtgccggccagcggcggggggcgcagtgcacacgagggggctggacttcgcctgtgacatctacatctgggcgcccttggccgggacttgtggggtccttctcctgtcactggttatcaccctttactgcaaacggggcagaaagaaactcctgtatatattcaaacaaccatttatgagaccagtacaaactactcaagaggaagatggctgtagctgccgatttccagaagaagaagaaggaggatgtgaactgagagtgaagttcagcaggagcgcagacgcccccgcgtaccagcagggccagaaccagctctataacgagctgaatctaggacgaagagaggagtacgatgttttggacaagagacgtggccgggaccctgagatggggggaaagccgagaaggaagaaccctcaggaaggcctgtacaatgaactgcagaaagataagatggcggaggcctacagtgagattgggatgaaaggcgagcgccggaggggcaaggggcacgatggcctttaccagggtctcagtacagccaccaaggacacctacgacgcccttcacatgcaggccctgccccctcgctaa

SEQ ID NO: 8389 - DNA, 1485 bp, synthetic construct
  source 1..1485: mol_type = other DNA
atggccttaccagtgaccgccttgctcctgccgctggccttgctgctccacgccgccaggccgcgcagcgagaagcgctacggaggcagcggagacatccagatgacacagagccctagcagcctgtctgccagcgtgggagacagagtgaccatcacatgcaaggccagccaggatgtgggcacagccgtggattggtatcagcagaagcctggcaaggcccctaagctgctgatctactgggccagcacaagacacacaggcgtgcccagcagattttctggcagcggctctggcaccgacttcaccctgacaatatccagcctccagcctgaggacttcgccacctactactgccagcagtacaacagctaccctctgaccttcggccagggcaccaaggtggaaatcaaaagaggcggaggcggatctggcggcggaggtagcggtggcggaggatctgaagtgcagctggttgaatcaggtggcggcctggttcaacctggcggatctctgagactgagctgtgccgccagcggctacacctttaccgagtacacaatccactgggtccgacaggcccctggcaaaggacttgagtgggtcgccaacatcaaccccaacaatggcggcaccacctacaaccagaagttcgaggacagattcaccatcagccgggacaacagcaagaacaccctgtacctccagatgaactccctgagagccgaggacaccgccgtgtactattgtgccagaggctggaacttcgactactggggccagggaacactggtcaccgttagctctacgcgtaccacgacgccagcgccgcgaccaccaacaccggcgcccaccatcgcgtcgcagcccctgtccctgcgcccagaggcgtgccggccagcggcggggggcgcagtgcacacgagggggctggacttcgcctgtgacatctacatctgggcgcccttggccgggacttgtggggtccttctcctgtcactggttatcaccctttactgcaaacggggcagaaagaaactcctgtatatattcaaacaaccatttatgagaccagtacaaactactcaagaggaagatggctgtagctgccgatttccagaagaagaagaaggaggatgtgaactgagagtgaagttcagcaggagcgcagacgcccccgcgtaccagcagggccagaaccagctctataacgagctgaatctaggacgaagagaggagtacgatgttttggacaagagacgtggccgggaccctgagatggggggaaagccgagaaggaagaaccctcaggaaggcctgtacaatgaactgcagaaagataagatggcggaggcctacagtgagattgggatgaaaggcgagcgccggaggggcaaggggcacgatggcctttaccagggtctcagtacagccaccaaggacacctacgacgcccttcacatgcaggccctgccccctcgctaa

SEQ ID NO: 8390 - DNA, 1485 bp, synthetic construct
  source 1..1485: mol_type = other DNA
atggccttaccagtgaccgccttgctcctgccgctggccttgctgctccacgccgccaggccgcgcagcgagctgcgctacggaggcagcggagacatccagatgacacagagccctagcagcctgtctgccagcgtgggagacagagtgaccatcacatgcaaggccagccaggatgtgggcacagccgtggattggtatcagcagaagcctggcaaggcccctaagctgctgatctactgggccagcacaagacacacaggcgtgcccagcagattttctggcagcggctctggcaccgacttcaccctgacaatatccagcctccagcctgaggacttcgccacctactactgccagcagtacaacagctaccctctgaccttcggccagggcaccaaggtggaaatcaaaagaggcggaggcggatctggcggcggaggtagcggtggcggaggatctgaagtgcagctggttgaatcaggtggcggcctggttcaacctggcggatctctgagactgagctgtgccgccagcggctacacctttaccgagtacacaatccactgggtccgacaggcccctggcaaaggacttgagtgggtcgccaacatcaaccccaacaatggcggcaccacctacaaccagaagttcgaggacagattcaccatcagccgggacaacagcaagaacaccctgtacctccagatgaactccctgagagccgaggacaccgccgtgtactattgtgccagaggctggaacttcgactactggggccagggaacactggtcaccgttagctctacgcgtaccacgacgccagcgccgcgaccaccaacaccggcgcccaccatcgcgtcgcagcccctgtccctgcgcccagaggcgtgccggccagcggcggggggcgcagtgcacacgagggggctggacttcgcctgtgacatctacatctgggcgcccttggccgggacttgtggggtccttctcctgtcactggttatcaccctttactgcaaacggggcagaaagaaactcctgtatatattcaaacaaccatttatgagaccagtacaaactactcaagaggaagatggctgtagctgccgatttccagaagaagaagaaggaggatgtgaactgagagtgaagttcagcaggagcgcagacgcccccgcgtaccagcagggccagaaccagctctataacgagctgaatctaggacgaagagaggagtacgatgttttggacaagagacgtggccgggaccctgagatggggggaaagccgagaaggaagaaccctcaggaaggcctgtacaatgaactgcagaaagataagatggcggaggcctacagtgagattgggatgaaaggcgagcgccggaggggcaaggggcacgatggcctttaccagggtctcagtacagccaccaaggacacctacgacgcccttcacatgcaggccctgccccctcgctaa

SEQ ID NO: 8391 - DNA, 1485 bp, synthetic construct
  source 1..1485: mol_type = other DNA
atggccttaccagtgaccgccttgctcctgccgctggccttgctgctccacgccgccaggccgcgcagcgagacccgctacggaggcagcggagacatccagatgacacagagccctagcagcctgtctgccagcgtgggagacagagtgaccatcacatgcaaggccagccaggatgtgggcacagccgtggattggtatcagcagaagcctggcaaggcccctaagctgctgatctactgggccagcacaagacacacaggcgtgcccagcagattttctggcagcggctctggcaccgacttcaccctgacaatatccagcctccagcctgaggacttcgccacctactactgccagcagtacaacagctaccctctgaccttcggccagggcaccaaggtggaaatcaaaagaggcggaggcggatctggcggcggaggtagcggtggcggaggatctgaagtgcagctggttgaatcaggtggcggcctggttcaacctggcggatctctgagactgagctgtgccgccagcggctacacctttaccgagtacacaatccactgggtccgacaggcccctggcaaaggacttgagtgggtcgccaacatcaaccccaacaatggcggcaccacctacaaccagaagttcgaggacagattcaccatcagccgggacaacagcaagaacaccctgtacctccagatgaactccctgagagccgaggacaccgccgtgtactattgtgccagaggctggaacttcgactactggggccagggaacactggtcaccgttagctctacgcgtaccacgacgccagcgccgcgaccaccaacaccggcgcccaccatcgcgtcgcagcccctgtccctgcgcccagaggcgtgccggccagcggcggggggcgcagtgcacacgagggggctggacttcgcctgtgacatctacatctgggcgcccttggccgggacttgtggggtccttctcctgtcactggttatcaccctttactgcaaacggggcagaaagaaactcctgtatatattcaaacaaccatttatgagaccagtacaaactactcaagaggaagatggctgtagctgccgatttccagaagaagaagaaggaggatgtgaactgagagtgaagttcagcaggagcgcagacgcccccgcgtaccagcagggccagaaccagctctataacgagctgaatctaggacgaagagaggagtacgatgttttggacaagagacgtggccgggaccctgagatggggggaaagccgagaaggaagaaccctcaggaaggcctgtacaatgaactgcagaaagataagatggcggaggcctacagtgagattgggatgaaaggcgagcgccggaggggcaaggggcacgatggcctttaccagggtctcagtacagccaccaaggacacctacgacgcccttcacatgcaggccctgccccctcgctaa

SEQ ID NO: 8392 - DNA, 1488 bp, synthetic construct
  source 1..1488: mol_type = other DNA
atggccttaccagtgaccgccttgctcctgccgctggccttgctgctccacgccgccaggccgcgcagcgaggaccgctacaagggaggcagcggagacatccagatgacacagagccctagcagcctgtctgccagcgtgggagacagagtgaccatcacatgcaaggccagccaggatgtgggcacagccgtggattggtatcagcagaagcctggcaaggcccctaagctgctgatctactgggccagcacaagacacacaggcgtgcccagcagattttctggcagcggctctggcaccgacttcaccctgacaatatccagcctccagcctgaggacttcgccacctactactgccagcagtacaacagctaccctctgaccttcggccagggcaccaaggtggaaatcaaaagaggcggaggcggatctggcggcggaggtagcggtggcggaggatctgaagtgcagctggttgaatcaggtggcggcctggttcaacctggcggatctctgagactgagctgtgccgccagcggctacacctttaccgagtacacaatccactgggtccgacaggcccctggcaaaggacttgagtgggtcgccaacatcaaccccaacaatggcggcaccacctacaaccagaagttcgaggacagattcaccatcagccgggacaacagcaagaacaccctgtacctccagatgaactccctgagagccgaggacaccgccgtgtactattgtgccagaggctggaacttcgactactggggccagggaacactggtcaccgttagctctacgcgtaccacgacgccagcgccgcgaccaccaacaccggcgcccaccatcgcgtcgcagcccctgtccctgcgcccagaggcgtgccggccagcggcggggggcgcagtgcacacgagggggctggacttcgcctgtgacatctacatctgggcgcccttggccgggacttgtggggtccttctcctgtcactggttatcaccctttactgcaaacggggcagaaagaaactcctgtatatattcaaacaaccatttatgagaccagtacaaactactcaagaggaagatggctgtagctgccgatttccagaagaagaagaaggaggatgtgaactgagagtgaagttcagcaggagcgcagacgcccccgcgtaccagcagggccagaaccagctctataacgagctgaatctaggacgaagagaggagtacgatgttttggacaagagacgtggccgggaccctgagatggggggaaagccgagaaggaagaaccctcaggaaggcctgtacaatgaactgcagaaagataagatggcggaggcctacagtgagattgggatgaaaggcgagcgccggaggggcaaggggcacgatggcctttaccagggtctcagtacagccaccaaggacacctacgacgcccttcacatgcaggccctgccccctcgctaa

SEQ ID NO: 8393 - DNA, 1488 bp, synthetic construct
  source 1..1488: mol_type = other DNA
atggccttaccagtgaccgccttgctcctgccgctggccttgctgctccacgccgccaggccgcgcagcgaggaccgctacagcggaggcagcggagacatccagatgacacagagccctagcagcctgtctgccagcgtgggagacagagtgaccatcacatgcaaggccagccaggatgtgggcacagccgtggattggtatcagcagaagcctggcaaggcccctaagctgctgatctactgggccagcacaagacacacaggcgtgcccagcagattttctggcagcggctctggcaccgacttcaccctgacaatatccagcctccagcctgaggacttcgccacctactactgccagcagtacaacagctaccctctgaccttcggccagggcaccaaggtggaaatcaaaagaggcggaggcggatctggcggcggaggtagcggtggcggaggatctgaagtgcagctggttgaatcaggtggcggcctggttcaacctggcggatctctgagactgagctgtgccgccagcggctacacctttaccgagtacacaatccactgggtccgacaggcccctggcaaaggacttgagtgggtcgccaacatcaaccccaacaatggcggcaccacctacaaccagaagttcgaggacagattcaccatcagccgggacaacagcaagaacaccctgtacctccagatgaactccctgagagccgaggacaccgccgtgtactattgtgccagaggctggaacttcgactactggggccagggaacactggtcaccgttagctctacgcgtaccacgacgccagcgccgcgaccaccaacaccggcgcccaccatcgcgtcgcagcccctgtccctgcgcccagaggcgtgccggccagcggcggggggcgcagtgcacacgagggggctggacttcgcctgtgacatctacatctgggcgcccttggccgggacttgtggggtccttctcctgtcactggttatcaccctttactgcaaacggggcagaaagaaactcctgtatatattcaaacaaccatttatgagaccagtacaaactactcaagaggaagatggctgtagctgccgatttccagaagaagaagaaggaggatgtgaactgagagtgaagttcagcaggagcgcagacgcccccgcgtaccagcagggccagaaccagctctataacgagctgaatctaggacgaagagaggagtacgatgttttggacaagagacgtggccgggaccctgagatggggggaaagccgagaaggaagaaccctcaggaaggcctgtacaatgaactgcagaaagataagatggcggaggcctacagtgagattgggatgaaaggcgagcgccggaggggcaaggggcacgatggcctttaccagggtctcagtacagccaccaaggacacctacgacgcccttcacatgcaggccctgccccctcgctaa

SEQ ID NO: 8394 - DNA, 1488 bp, synthetic construct
  source 1..1488: mol_type = other DNA
atggccttaccagtgaccgccttgctcctgccgctggccttgctgctccacgccgccaggccgcgcagcgaggaccgctacttcggaggcagcggagacatccagatgacacagagccctagcagcctgtctgccagcgtgggagacagagtgaccatcacatgcaaggccagccaggatgtgggcacagccgtggattggtatcagcagaagcctggcaaggcccctaagctgctgatctactgggccagcacaagacacacaggcgtgcccagcagattttctggcagcggctctggcaccgacttcaccctgacaatatccagcctccagcctgaggacttcgccacctactactgccagcagtacaacagctaccctctgaccttcggccagggcaccaaggtggaaatcaaaagaggcggaggcggatctggcggcggaggtagcggtggcggaggatctgaagtgcagctggttgaatcaggtggcggcctggttcaacctggcggatctctgagactgagctgtgccgccagcggctacacctttaccgagtacacaatccactgggtccgacaggcccctggcaaaggacttgagtgggtcgccaacatcaaccccaacaatggcggcaccacctacaaccagaagttcgaggacagattcaccatcagccgggacaacagcaagaacaccctgtacctccagatgaactccctgagagccgaggacaccgccgtgtactattgtgccagaggctggaacttcgactactggggccagggaacactggtcaccgttagctctacgcgtaccacgacgccagcgccgcgaccaccaacaccggcgcccaccatcgcgtcgcagcccctgtccctgcgcccagaggcgtgccggccagcggcggggggcgcagtgcacacgagggggctggacttcgcctgtgacatctacatctgggcgcccttggccgggacttgtggggtccttctcctgtcactggttatcaccctttactgcaaacggggcagaaagaaactcctgtatatattcaaacaaccatttatgagaccagtacaaactactcaagaggaagatggctgtagctgccgatttccagaagaagaagaaggaggatgtgaactgagagtgaagttcagcaggagcgcagacgcccccgcgtaccagcagggccagaaccagctctataacgagctgaatctaggacgaagagaggagtacgatgttttggacaagagacgtggccgggaccctgagatggggggaaagccgagaaggaagaaccctcaggaaggcctgtacaatgaactgcagaaagataagatggcggaggcctacagtgagattgggatgaaaggcgagcgccggaggggcaaggggcacgatggcctttaccagggtctcagtacagccaccaaggacacctacgacgcccttcacatgcaggccctgccccctcgctaa

SEQ ID NO: 8395 - DNA, 1488 bp, synthetic construct
  source 1..1488: mol_type = other DNA
atggccttaccagtgaccgccttgctcctgccgctggccttgctgctccacgccgccaggccgcgcagcgaggaccgctacatcggaggcagcggagacatccagatgacacagagccctagcagcctgtctgccagcgtgggagacagagtgaccatcacatgcaaggccagccaggatgtgggcacagccgtggattggtatcagcagaagcctggcaaggcccctaagctgctgatctactgggccagcacaagacacacaggcgtgcccagcagattttctggcagcggctctggcaccgacttcaccctgacaatatccagcctccagcctgaggacttcgccacctactactgccagcagtacaacagctaccctctgaccttcggccagggcaccaaggtggaaatcaaaagaggcggaggcggatctggcggcggaggtagcggtggcggaggatctgaagtgcagctggttgaatcaggtggcggcctggttcaacctggcggatctctgagactgagctgtgccgccagcggctacacctttaccgagtacacaatccactgggtccgacaggcccctggcaaaggacttgagtgggtcgccaacatcaaccccaacaatggcggcaccacctacaaccagaagttcgaggacagattcaccatcagccgggacaacagcaagaacaccctgtacctccagatgaactccctgagagccgaggacaccgccgtgtactattgtgccagaggctggaacttcgactactggggccagggaacactggtcaccgttagctctacgcgtaccacgacgccagcgccgcgaccaccaacaccggcgcccaccatcgcgtcgcagcccctgtccctgcgcccagaggcgtgccggccagcggcggggggcgcagtgcacacgagggggctggacttcgcctgtgacatctacatctgggcgcccttggccgggacttgtggggtccttctcctgtcactggttatcaccctttactgcaaacggggcagaaagaaactcctgtatatattcaaacaaccatttatgagaccagtacaaactactcaagaggaagatggctgtagctgccgatttccagaagaagaagaaggaggatgtgaactgagagtgaagttcagcaggagcgcagacgcccccgcgtaccagcagggccagaaccagctctataacgagctgaatctaggacgaagagaggagtacgatgttttggacaagagacgtggccgggaccctgagatggggggaaagccgagaaggaagaaccctcaggaaggcctgtacaatgaactgcagaaagataagatggcggaggcctacagtgagattgggatgaaaggcgagcgccggaggggcaaggggcacgatggcctttaccagggtctcagtacagccaccaaggacacctacgacgcccttcacatgcaggccctgccccctcgctaa

SEQ ID NO: 8396 - DNA, 1488 bp, synthetic construct
  source 1..1488: mol_type = other DNA
atggccttaccagtgaccgccttgctcctgccgctggccttgctgctccacgccgccaggccgcgcagcgaggaccgctacaacggaggcagcggagacatccagatgacacagagccctagcagcctgtctgccagcgtgggagacagagtgaccatcacatgcaaggccagccaggatgtgggcacagccgtggattggtatcagcagaagcctggcaaggcccctaagctgctgatctactgggccagcacaagacacacaggcgtgcccagcagattttctggcagcggctctggcaccgacttcaccctgacaatatccagcctccagcctgaggacttcgccacctactactgccagcagtacaacagctaccctctgaccttcggccagggcaccaaggtggaaatcaaaagaggcggaggcggatctggcggcggaggtagcggtggcggaggatctgaagtgcagctggttgaatcaggtggcggcctggttcaacctggcggatctctgagactgagctgtgccgccagcggctacacctttaccgagtacacaatccactgggtccgacaggcccctggcaaaggacttgagtgggtcgccaacatcaaccccaacaatggcggcaccacctacaaccagaagttcgaggacagattcaccatcagccgggacaacagcaagaacaccctgtacctccagatgaactccctgagagccgaggacaccgccgtgtactattgtgccagaggctggaacttcgactactggggccagggaacactggtcaccgttagctctacgcgtaccacgacgccagcgccgcgaccaccaacaccggcgcccaccatcgcgtcgcagcccctgtccctgcgcccagaggcgtgccggccagcggcggggggcgcagtgcacacgagggggctggacttcgcctgtgacatctacatctgggcgcccttggccgggacttgtggggtccttctcctgtcactggttatcaccctttactgcaaacggggcagaaagaaactcctgtatatattcaaacaaccatttatgagaccagtacaaactactcaagaggaagatggctgtagctgccgatttccagaagaagaagaaggaggatgtgaactgagagtgaagttcagcaggagcgcagacgcccccgcgtaccagcagggccagaaccagctctataacgagctgaatctaggacgaagagaggagtacgatgttttggacaagagacgtggccgggaccctgagatggggggaaagccgagaaggaagaaccctcaggaaggcctgtacaatgaactgcagaaagataagatggcggaggcctacagtgagattgggatgaaaggcgagcgccggaggggcaaggggcacgatggcctttaccagggtctcagtacagccaccaaggacacctacgacgcccttcacatgcaggccctgccccctcgctaa

SEQ ID NO: 8397 - DNA, 1488 bp, synthetic construct
  source 1..1488: mol_type = other DNA
atggccttaccagtgaccgccttgctcctgccgctggccttgctgctccacgccgccaggccgcgcagcgaggaccgctacaccggaggcagcggagacatccagatgacacagagccctagcagcctgtctgccagcgtgggagacagagtgaccatcacatgcaaggccagccaggatgtgggcacagccgtggattggtatcagcagaagcctggcaaggcccctaagctgctgatctactgggccagcacaagacacacaggcgtgcccagcagattttctggcagcggctctggcaccgacttcaccctgacaatatccagcctccagcctgaggacttcgccacctactactgccagcagtacaacagctaccctctgaccttcggccagggcaccaaggtggaaatcaaaagaggcggaggcggatctggcggcggaggtagcggtggcggaggatctgaagtgcagctggttgaatcaggtggcggcctggttcaacctggcggatctctgagactgagctgtgccgccagcggctacacctttaccgagtacacaatccactgggtccgacaggcccctggcaaaggacttgagtgggtcgccaacatcaaccccaacaatggcggcaccacctacaaccagaagttcgaggacagattcaccatcagccgggacaacagcaagaacaccctgtacctccagatgaactccctgagagccgaggacaccgccgtgtactattgtgccagaggctggaacttcgactactggggccagggaacactggtcaccgttagctctacgcgtaccacgacgccagcgccgcgaccaccaacaccggcgcccaccatcgcgtcgcagcccctgtccctgcgcccagaggcgtgccggccagcggcggggggcgcagtgcacacgagggggctggacttcgcctgtgacatctacatctgggcgcccttggccgggacttgtggggtccttctcctgtcactggttatcaccctttactgcaaacggggcagaaagaaactcctgtatatattcaaacaaccatttatgagaccagtacaaactactcaagaggaagatggctgtagctgccgatttccagaagaagaagaaggaggatgtgaactgagagtgaagttcagcaggagcgcagacgcccccgcgtaccagcagggccagaaccagctctataacgagctgaatctaggacgaagagaggagtacgatgttttggacaagagacgtggccgggaccctgagatggggggaaagccgagaaggaagaaccctcaggaaggcctgtacaatgaactgcagaaagataagatggcggaggcctacagtgagattgggatgaaaggcgagcgccggaggggcaaggggcacgatggcctttaccagggtctcagtacagccaccaaggacacctacgacgcccttcacatgcaggccctgccccctcgctaa

SEQ ID NO: 8398 - DNA, 1488 bp, synthetic construct
  source 1..1488: mol_type = other DNA
atggccttaccagtgaccgccttgctcctgccgctggccttgctgctccacgccgccaggccgcgcagcgaggaccgctacgccggaggcagcggagacatccagatgacacagagccctagcagcctgtctgccagcgtgggagacagagtgaccatcacatgcaaggccagccaggatgtgggcacagccgtggattggtatcagcagaagcctggcaaggcccctaagctgctgatctactgggccagcacaagacacacaggcgtgcccagcagattttctggcagcggctctggcaccgacttcaccctgacaatatccagcctccagcctgaggacttcgccacctactactgccagcagtacaacagctaccctctgaccttcggccagggcaccaaggtggaaatcaaaagaggcggaggcggatctggcggcggaggtagcggtggcggaggatctgaagtgcagctggttgaatcaggtggcggcctggttcaacctggcggatctctgagactgagctgtgccgccagcggctacacctttaccgagtacacaatccactgggtccgacaggcccctggcaaaggacttgagtgggtcgccaacatcaaccccaacaatggcggcaccacctacaaccagaagttcgaggacagattcaccatcagccgggacaacagcaagaacaccctgtacctccagatgaactccctgagagccgaggacaccgccgtgtactattgtgccagaggctggaacttcgactactggggccagggaacactggtcaccgttagctctacgcgtaccacgacgccagcgccgcgaccaccaacaccggcgcccaccatcgcgtcgcagcccctgtccctgcgcccagaggcgtgccggccagcggcggggggcgcagtgcacacgagggggctggacttcgcctgtgacatctacatctgggcgcccttggccgggacttgtggggtccttctcctgtcactggttatcaccctttactgcaaacggggcagaaagaaactcctgtatatattcaaacaaccatttatgagaccagtacaaactactcaagaggaagatggctgtagctgccgatttccagaagaagaagaaggaggatgtgaactgagagtgaagttcagcaggagcgcagacgcccccgcgtaccagcagggccagaaccagctctataacgagctgaatctaggacgaagagaggagtacgatgttttggacaagagacgtggccgggaccctgagatggggggaaagccgagaaggaagaaccctcaggaaggcctgtacaatgaactgcagaaagataagatggcggaggcctacagtgagattgggatgaaaggcgagcgccggaggggcaaggggcacgatggcctttaccagggtctcagtacagccaccaaggacacctacgacgcccttcacatgcaggccctgccccctcgctaa

SEQ ID NO: 8399 - DNA, 1488 bp, synthetic construct
  source 1..1488: mol_type = other DNA
atggccttaccagtgaccgccttgctcctgccgctggccttgctgctccacgccgccaggccgcgcagcgaggaccactaccgcggaggcagcggagacatccagatgacacagagccctagcagcctgtctgccagcgtgggagacagagtgaccatcacatgcaaggccagccaggatgtgggcacagccgtggattggtatcagcagaagcctggcaaggcccctaagctgctgatctactgggccagcacaagacacacaggcgtgcccagcagattttctggcagcggctctggcaccgacttcaccctgacaatatccagcctccagcctgaggacttcgccacctactactgccagcagtacaacagctaccctctgaccttcggccagggcaccaaggtggaaatcaaaagaggcggaggcggatctggcggcggaggtagcggtggcggaggatctgaagtgcagctggttgaatcaggtggcggcctggttcaacctggcggatctctgagactgagctgtgccgccagcggctacacctttaccgagtacacaatccactgggtccgacaggcccctggcaaaggacttgagtgggtcgccaacatcaaccccaacaatggcggcaccacctacaaccagaagttcgaggacagattcaccatcagccgggacaacagcaagaacaccctgtacctccagatgaactccctgagagccgaggacaccgccgtgtactattgtgccagaggctggaacttcgactactggggccagggaacactggtcaccgttagctctacgcgtaccacgacgccagcgccgcgaccaccaacaccggcgcccaccatcgcgtcgcagcccctgtccctgcgcccagaggcgtgccggccagcggcggggggcgcagtgcacacgagggggctggacttcgcctgtgacatctacatctgggcgcccttggccgggacttgtggggtccttctcctgtcactggttatcaccctttactgcaaacggggcagaaagaaactcctgtatatattcaaacaaccatttatgagaccagtacaaactactcaagaggaagatggctgtagctgccgatttccagaagaagaagaaggaggatgtgaactgagagtgaagttcagcaggagcgcagacgcccccgcgtaccagcagggccagaaccagctctataacgagctgaatctaggacgaagagaggagtacgatgttttggacaagagacgtggccgggaccctgagatggggggaaagccgagaaggaagaaccctcaggaaggcctgtacaatgaactgcagaaagataagatggcggaggcctacagtgagattgggatgaaaggcgagcgccggaggggcaaggggcacgatggcctttaccagggtctcagtacagccaccaaggacacctacgacgcccttcacatgcaggccctgccccctcgctaa

SEQ ID NO: 8400 - DNA, 1488 bp, synthetic construct
  source 1..1488: mol_type = other DNA
atggccttaccagtgaccgccttgctcctgccgctggccttgctgctccacgccgccaggccgcgcagcgagagccgctaccgcggaggcagcggagacatccagatgacacagagccctagcagcctgtctgccagcgtgggagacagagtgaccatcacatgcaaggccagccaggatgtgggcacagccgtggattggtatcagcagaagcctggcaaggcccctaagctgctgatctactgggccagcacaagacacacaggcgtgcccagcagattttctggcagcggctctggcaccgacttcaccctgacaatatccagcctccagcctgaggacttcgccacctactactgccagcagtacaacagctaccctctgaccttcggccagggcaccaaggtggaaatcaaaagaggcggaggcggatctggcggcggaggtagcggtggcggaggatctgaagtgcagctggttgaatcaggtggcggcctggttcaacctggcggatctctgagactgagctgtgccgccagcggctacacctttaccgagtacacaatccactgggtccgacaggcccctggcaaaggacttgagtgggtcgccaacatcaaccccaacaatggcggcaccacctacaaccagaagttcgaggacagattcaccatcagccgggacaacagcaagaacaccctgtacctccagatgaactccctgagagccgaggacaccgccgtgtactattgtgccagaggctggaacttcgactactggggccagggaacactggtcaccgttagctctacgcgtaccacgacgccagcgccgcgaccaccaacaccggcgcccaccatcgcgtcgcagcccctgtccctgcgcccagaggcgtgccggccagcggcggggggcgcagtgcacacgagggggctggacttcgcctgtgacatctacatctgggcgcccttggccgggacttgtggggtccttctcctgtcactggttatcaccctttactgcaaacggggcagaaagaaactcctgtatatattcaaacaaccatttatgagaccagtacaaactactcaagaggaagatggctgtagctgccgatttccagaagaagaagaaggaggatgtgaactgagagtgaagttcagcaggagcgcagacgcccccgcgtaccagcagggccagaaccagctctataacgagctgaatctaggacgaagagaggagtacgatgttttggacaagagacgtggccgggaccctgagatggggggaaagccgagaaggaagaaccctcaggaaggcctgtacaatgaactgcagaaagataagatggcggaggcctacagtgagattgggatgaaaggcgagcgccggaggggcaaggggcacgatggcctttaccagggtctcagtacagccaccaaggacacctacgacgcccttcacatgcaggccctgccccctcgctaa

SEQ ID NO: 8401 - DNA, 1488 bp, synthetic construct
  source 1..1488: mol_type = other DNA
atggccttaccagtgaccgccttgctcctgccgctggccttgctgctccacgccgccaggccgcgcagcgagaaccgctaccgcggaggcagcggagacatccagatgacacagagccctagcagcctgtctgccagcgtgggagacagagtgaccatcacatgcaaggccagccaggatgtgggcacagccgtggattggtatcagcagaagcctggcaaggcccctaagctgctgatctactgggccagcacaagacacacaggcgtgcccagcagattttctggcagcggctctggcaccgacttcaccctgacaatatccagcctccagcctgaggacttcgccacctactactgccagcagtacaacagctaccctctgaccttcggccagggcaccaaggtggaaatcaaaagaggcggaggcggatctggcggcggaggtagcggtggcggaggatctgaagtgcagctggttgaatcaggtggcggcctggttcaacctggcggatctctgagactgagctgtgccgccagcggctacacctttaccgagtacacaatccactgggtccgacaggcccctggcaaaggacttgagtgggtcgccaacatcaaccccaacaatggcggcaccacctacaaccagaagttcgaggacagattcaccatcagccgggacaacagcaagaacaccctgtacctccagatgaactccctgagagccgaggacaccgccgtgtactattgtgccagaggctggaacttcgactactggggccagggaacactggtcaccgttagctctacgcgtaccacgacgccagcgccgcgaccaccaacaccggcgcccaccatcgcgtcgcagcccctgtccctgcgcccagaggcgtgccggccagcggcggggggcgcagtgcacacgagggggctggacttcgcctgtgacatctacatctgggcgcccttggccgggacttgtggggtccttctcctgtcactggttatcaccctttactgcaaacggggcagaaagaaactcctgtatatattcaaacaaccatttatgagaccagtacaaactactcaagaggaagatggctgtagctgccgatttccagaagaagaagaaggaggatgtgaactgagagtgaagttcagcaggagcgcagacgcccccgcgtaccagcagggccagaaccagctctataacgagctgaatctaggacgaagagaggagtacgatgttttggacaagagacgtggccgggaccctgagatggggggaaagccgagaaggaagaaccctcaggaaggcctgtacaatgaactgcagaaagataagatggcggaggcctacagtgagattgggatgaaaggcgagcgccggaggggcaaggggcacgatggcctttaccagggtctcagtacagccaccaaggacacctacgacgcccttcacatgcaggccctgccccctcgctaa

SEQ ID NO: 8402 - DNA, 1488 bp, synthetic construct
  source 1..1488: mol_type = other DNA
atggccttaccagtgaccgccttgctcctgccgctggccttgctgctccacgccgccaggccgcgcagcgagggccgctaccgcggaggcagcggagacatccagatgacacagagccctagcagcctgtctgccagcgtgggagacagagtgaccatcacatgcaaggccagccaggatgtgggcacagccgtggattggtatcagcagaagcctggcaaggcccctaagctgctgatctactgggccagcacaagacacacaggcgtgcccagcagattttctggcagcggctctggcaccgacttcaccctgacaatatccagcctccagcctgaggacttcgccacctactactgccagcagtacaacagctaccctctgaccttcggccagggcaccaaggtggaaatcaaaagaggcggaggcggatctggcggcggaggtagcggtggcggaggatctgaagtgcagctggttgaatcaggtggcggcctggttcaacctggcggatctctgagactgagctgtgccgccagcggctacacctttaccgagtacacaatccactgggtccgacaggcccctggcaaaggacttgagtgggtcgccaacatcaaccccaacaatggcggcaccacctacaaccagaagttcgaggacagattcaccatcagccgggacaacagcaagaacaccctgtacctccagatgaactccctgagagccgaggacaccgccgtgtactattgtgccagaggctggaacttcgactactggggccagggaacactggtcaccgttagctctacgcgtaccacgacgccagcgccgcgaccaccaacaccggcgcccaccatcgcgtcgcagcccctgtccctgcgcccagaggcgtgccggccagcggcggggggcgcagtgcacacgagggggctggacttcgcctgtgacatctacatctgggcgcccttggccgggacttgtggggtccttctcctgtcactggttatcaccctttactgcaaacggggcagaaagaaactcctgtatatattcaaacaaccatttatgagaccagtacaaactactcaagaggaagatggctgtagctgccgatttccagaagaagaagaaggaggatgtgaactgagagtgaagttcagcaggagcgcagacgcccccgcgtaccagcagggccagaaccagctctataacgagctgaatctaggacgaagagaggagtacgatgttttggacaagagacgtggccgggaccctgagatggggggaaagccgagaaggaagaaccctcaggaaggcctgtacaatgaactgcagaaagataagatggcggaggcctacagtgagattgggatgaaaggcgagcgccggaggggcaaggggcacgatggcctttaccagggtctcagtacagccaccaaggacacctacgacgcccttcacatgcaggccctgccccctcgctaa

SEQ ID NO: 8403 - DNA, 1488 bp, synthetic construct
  source 1..1488: mol_type = other DNA
atggccttaccagtgaccgccttgctcctgccgctggccttgctgctccacgccgccaggccgcgcagcgaggcccgctaccgcggaggcagcggagacatccagatgacacagagccctagcagcctgtctgccagcgtgggagacagagtgaccatcacatgcaaggccagccaggatgtgggcacagccgtggattggtatcagcagaagcctggcaaggcccctaagctgctgatctactgggccagcacaagacacacaggcgtgcccagcagattttctggcagcggctctggcaccgacttcaccctgacaatatccagcctccagcctgaggacttcgccacctactactgccagcagtacaacagctaccctctgaccttcggccagggcaccaaggtggaaatcaaaagaggcggaggcggatctggcggcggaggtagcggtggcggaggatctgaagtgcagctggttgaatcaggtggcggcctggttcaacctggcggatctctgagactgagctgtgccgccagcggctacacctttaccgagtacacaatccactgggtccgacaggcccctggcaaaggacttgagtgggtcgccaacatcaaccccaacaatggcggcaccacctacaaccagaagttcgaggacagattcaccatcagccgggacaacagcaagaacaccctgtacctccagatgaactccctgagagccgaggacaccgccgtgtactattgtgccagaggctggaacttcgactactggggccagggaacactggtcaccgttagctctacgcgtaccacgacgccagcgccgcgaccaccaacaccggcgcccaccatcgcgtcgcagcccctgtccctgcgcccagaggcgtgccggccagcggcggggggcgcagtgcacacgagggggctggacttcgcctgtgacatctacatctgggcgcccttggccgggacttgtggggtccttctcctgtcactggttatcaccctttactgcaaacggggcagaaagaaactcctgtatatattcaaacaaccatttatgagaccagtacaaactactcaagaggaagatggctgtagctgccgatttccagaagaagaagaaggaggatgtgaactgagagtgaagttcagcaggagcgcagacgcccccgcgtaccagcagggccagaaccagctctataacgagctgaatctaggacgaagagaggagtacgatgttttggacaagagacgtggccgggaccctgagatggggggaaagccgagaaggaagaaccctcaggaaggcctgtacaatgaactgcagaaagataagatggcggaggcctacagtgagattgggatgaaaggcgagcgccggaggggcaaggggcacgatggcctttaccagggtctcagtacagccaccaaggacacctacgacgcccttcacatgcaggccctgccccctcgctaa

SEQ ID NO: 8404 - DNA, 1488 bp, synthetic construct
  source 1..1488: mol_type = other DNA
atggccttaccagtgaccgccttgctcctgccgctggccttgctgctccacgccgccaggccgcgcagcgagcagcgctaccgcggaggcagcggagacatccagatgacacagagccctagcagcctgtctgccagcgtgggagacagagtgaccatcacatgcaaggccagccaggatgtgggcacagccgtggattggtatcagcagaagcctggcaaggcccctaagctgctgatctactgggccagcacaagacacacaggcgtgcccagcagattttctggcagcggctctggcaccgacttcaccctgacaatatccagcctccagcctgaggacttcgccacctactactgccagcagtacaacagctaccctctgaccttcggccagggcaccaaggtggaaatcaaaagaggcggaggcggatctggcggcggaggtagcggtggcggaggatctgaagtgcagctggttgaatcaggtggcggcctggttcaacctggcggatctctgagactgagctgtgccgccagcggctacacctttaccgagtacacaatccactgggtccgacaggcccctggcaaaggacttgagtgggtcgccaacatcaaccccaacaatggcggcaccacctacaaccagaagttcgaggacagattcaccatcagccgggacaacagcaagaacaccctgtacctccagatgaactccctgagagccgaggacaccgccgtgtactattgtgccagaggctggaacttcgactactggggccagggaacactggtcaccgttagctctacgcgtaccacgacgccagcgccgcgaccaccaacaccggcgcccaccatcgcgtcgcagcccctgtccctgcgcccagaggcgtgccggccagcggcggggggcgcagtgcacacgagggggctggacttcgcctgtgacatctacatctgggcgcccttggccgggacttgtggggtccttctcctgtcactggttatcaccctttactgcaaacggggcagaaagaaactcctgtatatattcaaacaaccatttatgagaccagtacaaactactcaagaggaagatggctgtagctgccgatttccagaagaagaagaaggaggatgtgaactgagagtgaagttcagcaggagcgcagacgcccccgcgtaccagcagggccagaaccagctctataacgagctgaatctaggacgaagagaggagtacgatgttttggacaagagacgtggccgggaccctgagatggggggaaagccgagaaggaagaaccctcaggaaggcctgtacaatgaactgcagaaagataagatggcggaggcctacagtgagattgggatgaaaggcgagcgccggaggggcaaggggcacgatggcctttaccagggtctcagtacagccaccaaggacacctacgacgcccttcacatgcaggccctgccccctcgctaa

SEQ ID NO: 8405 - DNA, 1488 bp, synthetic construct
  source 1..1488: mol_type = other DNA
atggccttaccagtgaccgccttgctcctgccgctggccttgctgctccacgccgccaggccgcgcagcgagaagcgctaccgcggaggcagcggagacatccagatgacacagagccctagcagcctgtctgccagcgtgggagacagagtgaccatcacatgcaaggccagccaggatgtgggcacagccgtggattggtatcagcagaagcctggcaaggcccctaagctgctgatctactgggccagcacaagacacacaggcgtgcccagcagattttctggcagcggctctggcaccgacttcaccctgacaatatccagcctccagcctgaggacttcgccacctactactgccagcagtacaacagctaccctctgaccttcggccagggcaccaaggtggaaatcaaaagaggcggaggcggatctggcggcggaggtagcggtggcggaggatctgaagtgcagctggttgaatcaggtggcggcctggttcaacctggcggatctctgagactgagctgtgccgccagcggctacacctttaccgagtacacaatccactgggtccgacaggcccctggcaaaggacttgagtgggtcgccaacatcaaccccaacaatggcggcaccacctacaaccagaagttcgaggacagattcaccatcagccgggacaacagcaagaacaccctgtacctccagatgaactccctgagagccgaggacaccgccgtgtactattgtgccagaggctggaacttcgactactggggccagggaacactggtcaccgttagctctacgcgtaccacgacgccagcgccgcgaccaccaacaccggcgcccaccatcgcgtcgcagcccctgtccctgcgcccagaggcgtgccggccagcggcggggggcgcagtgcacacgagggggctggacttcgcctgtgacatctacatctgggcgcccttggccgggacttgtggggtccttctcctgtcactggttatcaccctttactgcaaacggggcagaaagaaactcctgtatatattcaaacaaccatttatgagaccagtacaaactactcaagaggaagatggctgtagctgccgatttccagaagaagaagaaggaggatgtgaactgagagtgaagttcagcaggagcgcagacgcccccgcgtaccagcagggccagaaccagctctataacgagctgaatctaggacgaagagaggagtacgatgttttggacaagagacgtggccgggaccctgagatggggggaaagccgagaaggaagaaccctcaggaaggcctgtacaatgaactgcagaaagataagatggcggaggcctacagtgagattgggatgaaaggcgagcgccggaggggcaaggggcacgatggcctttaccagggtctcagtacagccaccaaggacacctacgacgcccttcacatgcaggccctgccccctcgctaa

SEQ ID NO: 8406 - DNA, 1488 bp, synthetic construct
  source 1..1488: mol_type = other DNA
atggccttaccagtgaccgccttgctcctgccgctggccttgctgctccacgccgccaggccgcgcagcgagctgcgctaccgcggaggcagcggagacatccagatgacacagagccctagcagcctgtctgccagcgtgggagacagagtgaccatcacatgcaaggccagccaggatgtgggcacagccgtggattggtatcagcagaagcctggcaaggcccctaagctgctgatctactgggccagcacaagacacacaggcgtgcccagcagattttctggcagcggctctggcaccgacttcaccctgacaatatccagcctccagcctgaggacttcgccacctactactgccagcagtacaacagctaccctctgaccttcggccagggcaccaaggtggaaatcaaaagaggcggaggcggatctggcggcggaggtagcggtggcggaggatctgaagtgcagctggttgaatcaggtggcggcctggttcaacctggcggatctctgagactgagctgtgccgccagcggctacacctttaccgagtacacaatccactgggtccgacaggcccctggcaaaggacttgagtgggtcgccaacatcaaccccaacaatggcggcaccacctacaaccagaagttcgaggacagattcaccatcagccgggacaacagcaagaacaccctgtacctccagatgaactccctgagagccgaggacaccgccgtgtactattgtgccagaggctggaacttcgactactggggccagggaacactggtcaccgttagctctacgcgtaccacgacgccagcgccgcgaccaccaacaccggcgcccaccatcgcgtcgcagcccctgtccctgcgcccagaggcgtgccggccagcggcggggggcgcagtgcacacgagggggctggacttcgcctgtgacatctacatctgggcgcccttggccgggacttgtggggtccttctcctgtcactggttatcaccctttactgcaaacggggcagaaagaaactcctgtatatattcaaacaaccatttatgagaccagtacaaactactcaagaggaagatggctgtagctgccgatttccagaagaagaagaaggaggatgtgaactgagagtgaagttcagcaggagcgcagacgcccccgcgtaccagcagggccagaaccagctctataacgagctgaatctaggacgaagagaggagtacgatgttttggacaagagacgtggccgggaccctgagatggggggaaagccgagaaggaagaaccctcaggaaggcctgtacaatgaactgcagaaagataagatggcggaggcctacagtgagattgggatgaaaggcgagcgccggaggggcaaggggcacgatggcctttaccagggtctcagtacagccaccaaggacacctacgacgcccttcacatgcaggccctgccccctcgctaa

SEQ ID NO: 8407 - DNA, 1488 bp, synthetic construct
  source 1..1488: mol_type = other DNA
atggccttaccagtgaccgccttgctcctgccgctggccttgctgctccacgccgccaggccgcgcagcgagacccgctaccgcggaggcagcggagacatccagatgacacagagccctagcagcctgtctgccagcgtgggagacagagtgaccatcacatgcaaggccagccaggatgtgggcacagccgtggattggtatcagcagaagcctggcaaggcccctaagctgctgatctactgggccagcacaagacacacaggcgtgcccagcagattttctggcagcggctctggcaccgacttcaccctgacaatatccagcctccagcctgaggacttcgccacctactactgccagcagtacaacagctaccctctgaccttcggccagggcaccaaggtggaaatcaaaagaggcggaggcggatctggcggcggaggtagcggtggcggaggatctgaagtgcagctggttgaatcaggtggcggcctggttcaacctggcggatctctgagactgagctgtgccgccagcggctacacctttaccgagtacacaatccactgggtccgacaggcccctggcaaaggacttgagtgggtcgccaacatcaaccccaacaatggcggcaccacctacaaccagaagttcgaggacagattcaccatcagccgggacaacagcaagaacaccctgtacctccagatgaactccctgagagccgaggacaccgccgtgtactattgtgccagaggctggaacttcgactactggggccagggaacactggtcaccgttagctctacgcgtaccacgacgccagcgccgcgaccaccaacaccggcgcccaccatcgcgtcgcagcccctgtccctgcgcccagaggcgtgccggccagcggcggggggcgcagtgcacacgagggggctggacttcgcctgtgacatctacatctgggcgcccttggccgggacttgtggggtccttctcctgtcactggttatcaccctttactgcaaacggggcagaaagaaactcctgtatatattcaaacaaccatttatgagaccagtacaaactactcaagaggaagatggctgtagctgccgatttccagaagaagaagaaggaggatgtgaactgagagtgaagttcagcaggagcgcagacgcccccgcgtaccagcagggccagaaccagctctataacgagctgaatctaggacgaagagaggagtacgatgttttggacaagagacgtggccgggaccctgagatggggggaaagccgagaaggaagaaccctcaggaaggcctgtacaatgaactgcagaaagataagatggcggaggcctacagtgagattgggatgaaaggcgagcgccggaggggcaaggggcacgatggcctttaccagggtctcagtacagccaccaaggacacctacgacgcccttcacatgcaggccctgccccctcgctaa

SEQ ID NO: 8408 - DNA, 1488 bp, synthetic construct
  source 1..1488: mol_type = other DNA
atggccttaccagtgaccgccttgctcctgccgctggccttgctgctccacgccgccaggccgcgcagcgaggaccactacaagggaggcagcggagacatccagatgacacagagccctagcagcctgtctgccagcgtgggagacagagtgaccatcacatgcaaggccagccaggatgtgggcacagccgtggattggtatcagcagaagcctggcaaggcccctaagctgctgatctactgggccagcacaagacacacaggcgtgcccagcagattttctggcagcggctctggcaccgacttcaccctgacaatatccagcctccagcctgaggacttcgccacctactactgccagcagtacaacagctaccctctgaccttcggccagggcaccaaggtggaaatcaaaagaggcggaggcggatctggcggcggaggtagcggtggcggaggatctgaagtgcagctggttgaatcaggtggcggcctggttcaacctggcggatctctgagactgagctgtgccgccagcggctacacctttaccgagtacacaatccactgggtccgacaggcccctggcaaaggacttgagtgggtcgccaacatcaaccccaacaatggcggcaccacctacaaccagaagttcgaggacagattcaccatcagccgggacaacagcaagaacaccctgtacctccagatgaactccctgagagccgaggacaccgccgtgtactattgtgccagaggctggaacttcgactactggggccagggaacactggtcaccgttagctctacgcgtaccacgacgccagcgccgcgaccaccaacaccggcgcccaccatcgcgtcgcagcccctgtccctgcgcccagaggcgtgccggccagcggcggggggcgcagtgcacacgagggggctggacttcgcctgtgacatctacatctgggcgcccttggccgggacttgtggggtccttctcctgtcactggttatcaccctttactgcaaacggggcagaaagaaactcctgtatatattcaaacaaccatttatgagaccagtacaaactactcaagaggaagatggctgtagctgccgatttccagaagaagaagaaggaggatgtgaactgagagtgaagttcagcaggagcgcagacgcccccgcgtaccagcagggccagaaccagctctataacgagctgaatctaggacgaagagaggagtacgatgttttggacaagagacgtggccgggaccctgagatggggggaaagccgagaaggaagaaccctcaggaaggcctgtacaatgaactgcagaaagataagatggcggaggcctacagtgagattgggatgaaaggcgagcgccggaggggcaaggggcacgatggcctttaccagggtctcagtacagccaccaaggacacctacgacgcccttcacatgcaggccctgccccctcgctaa

SEQ ID NO: 8409 - DNA, 1488 bp, synthetic construct
  source 1..1488: mol_type = other DNA
atggccttaccagtgaccgccttgctcctgccgctggccttgctgctccacgccgccaggccgcgcagcgagagccgctacaagggaggcagcggagacatccagatgacacagagccctagcagcctgtctgccagcgtgggagacagagtgaccatcacatgcaaggccagccaggatgtgggcacagccgtggattggtatcagcagaagcctggcaaggcccctaagctgctgatctactgggccagcacaagacacacaggcgtgcccagcagattttctggcagcggctctggcaccgacttcaccctgacaatatccagcctccagcctgaggacttcgccacctactactgccagcagtacaacagctaccctctgaccttcggccagggcaccaaggtggaaatcaaaagaggcggaggcggatctggcggcggaggtagcggtggcggaggatctgaagtgcagctggttgaatcaggtggcggcctggttcaacctggcggatctctgagactgagctgtgccgccagcggctacacctttaccgagtacacaatccactgggtccgacaggcccctggcaaaggacttgagtgggtcgccaacatcaaccccaacaatggcggcaccacctacaaccagaagttcgaggacagattcaccatcagccgggacaacagcaagaacaccctgtacctccagatgaactccctgagagccgaggacaccgccgtgtactattgtgccagaggctggaacttcgactactggggccagggaacactggtcaccgttagctctacgcgtaccacgacgccagcgccgcgaccaccaacaccggcgcccaccatcgcgtcgcagcccctgtccctgcgcccagaggcgtgccggccagcggcggggggcgcagtgcacacgagggggctggacttcgcctgtgacatctacatctgggcgcccttggccgggacttgtggggtccttctcctgtcactggttatcaccctttactgcaaacggggcagaaagaaactcctgtatatattcaaacaaccatttatgagaccagtacaaactactcaagaggaagatggctgtagctgccgatttccagaagaagaagaaggaggatgtgaactgagagtgaagttcagcaggagcgcagacgcccccgcgtaccagcagggccagaaccagctctataacgagctgaatctaggacgaagagaggagtacgatgttttggacaagagacgtggccgggaccctgagatggggggaaagccgagaaggaagaaccctcaggaaggcctgtacaatgaactgcagaaagataagatggcggaggcctacagtgagattgggatgaaaggcgagcgccggaggggcaaggggcacgatggcctttaccagggtctcagtacagccaccaaggacacctacgacgcccttcacatgcaggccctgccccctcgctaa

SEQ ID NO: 8410 - DNA, 1488 bp, synthetic construct
  source 1..1488: mol_type = other DNA
atggccttaccagtgaccgccttgctcctgccgctggccttgctgctccacgccgccaggccgcgcagcgagaaccgctacaagggaggcagcggagacatccagatgacacagagccctagcagcctgtctgccagcgtgggagacagagtgaccatcacatgcaaggccagccaggatgtgggcacagccgtggattggtatcagcagaagcctggcaaggcccctaagctgctgatctactgggccagcacaagacacacaggcgtgcccagcagattttctggcagcggctctggcaccgacttcaccctgacaatatccagcctccagcctgaggacttcgccacctactactgccagcagtacaacagctaccctctgaccttcggccagggcaccaaggtggaaatcaaaagaggcggaggcggatctggcggcggaggtagcggtggcggaggatctgaagtgcagctggttgaatcaggtggcggcctggttcaacctggcggatctctgagactgagctgtgccgccagcggctacacctttaccgagtacacaatccactgggtccgacaggcccctggcaaaggacttgagtgggtcgccaacatcaaccccaacaatggcggcaccacctacaaccagaagttcgaggacagattcaccatcagccgggacaacagcaagaacaccctgtacctccagatgaactccctgagagccgaggacaccgccgtgtactattgtgccagaggctggaacttcgactactggggccagggaacactggtcaccgttagctctacgcgtaccacgacgccagcgccgcgaccaccaacaccggcgcccaccatcgcgtcgcagcccctgtccctgcgcccagaggcgtgccggccagcggcggggggcgcagtgcacacgagggggctggacttcgcctgtgacatctacatctgggcgcccttggccgggacttgtggggtccttctcctgtcactggttatcaccctttactgcaaacggggcagaaagaaactcctgtatatattcaaacaaccatttatgagaccagtacaaactactcaagaggaagatggctgtagctgccgatttccagaagaagaagaaggaggatgtgaactgagagtgaagttcagcaggagcgcagacgcccccgcgtaccagcagggccagaaccagctctataacgagctgaatctaggacgaagagaggagtacgatgttttggacaagagacgtggccgggaccctgagatggggggaaagccgagaaggaagaaccctcaggaaggcctgtacaatgaactgcagaaagataagatggcggaggcctacagtgagattgggatgaaaggcgagcgccggaggggcaaggggcacgatggcctttaccagggtctcagtacagccaccaaggacacctacgacgcccttcacatgcaggccctgccccctcgctaa

SEQ ID NO: 8411 - DNA, 1488 bp, synthetic construct
  source 1..1488: mol_type = other DNA
atggccttaccagtgaccgccttgctcctgccgctggccttgctgctccacgccgccaggccgcgcagcgagggccgctacaagggaggcagcggagacatccagatgacacagagccctagcagcctgtctgccagcgtgggagacagagtgaccatcacatgcaaggccagccaggatgtgggcacagccgtggattggtatcagcagaagcctggcaaggcccctaagctgctgatctactgggccagcacaagacacacaggcgtgcccagcagattttctggcagcggctctggcaccgacttcaccctgacaatatccagcctccagcctgaggacttcgccacctactactgccagcagtacaacagctaccctctgaccttcggccagggcaccaaggtggaaatcaaaagaggcggaggcggatctggcggcggaggtagcggtggcggaggatctgaagtgcagctggttgaatcaggtggcggcctggttcaacctggcggatctctgagactgagctgtgccgccagcggctacacctttaccgagtacacaatccactgggtccgacaggcccctggcaaaggacttgagtgggtcgccaacatcaaccccaacaatggcggcaccacctacaaccagaagttcgaggacagattcaccatcagccgggacaacagcaagaacaccctgtacctccagatgaactccctgagagccgaggacaccgccgtgtactattgtgccagaggctggaacttcgactactggggccagggaacactggtcaccgttagctctacgcgtaccacgacgccagcgccgcgaccaccaacaccggcgcccaccatcgcgtcgcagcccctgtccctgcgcccagaggcgtgccggccagcggcggggggcgcagtgcacacgagggggctggacttcgcctgtgacatctacatctgggcgcccttggccgggacttgtggggtccttctcctgtcactggttatcaccctttactgcaaacggggcagaaagaaactcctgtatatattcaaacaaccatttatgagaccagtacaaactactcaagaggaagatggctgtagctgccgatttccagaagaagaagaaggaggatgtgaactgagagtgaagttcagcaggagcgcagacgcccccgcgtaccagcagggccagaaccagctctataacgagctgaatctaggacgaagagaggagtacgatgttttggacaagagacgtggccgggaccctgagatggggggaaagccgagaaggaagaaccctcaggaaggcctgtacaatgaactgcagaaagataagatggcggaggcctacagtgagattgggatgaaaggcgagcgccggaggggcaaggggcacgatggcctttaccagggtctcagtacagccaccaaggacacctacgacgcccttcacatgcaggccctgccccctcgctaa

SEQ ID NO: 8412 - DNA, 1488 bp, synthetic construct
  source 1..1488: mol_type = other DNA
atggccttaccagtgaccgccttgctcctgccgctggccttgctgctccacgccgccaggccgcgcagcgaggcccgctacaagggaggcagcggagacatccagatgacacagagccctagcagcctgtctgccagcgtgggagacagagtgaccatcacatgcaaggccagccaggatgtgggcacagccgtggattggtatcagcagaagcctggcaaggcccctaagctgctgatctactgggccagcacaagacacacaggcgtgcccagcagattttctggcagcggctctggcaccgacttcaccctgacaatatccagcctccagcctgaggacttcgccacctactactgccagcagtacaacagctaccctctgaccttcggccagggcaccaaggtggaaatcaaaagaggcggaggcggatctggcggcggaggtagcggtggcggaggatctgaagtgcagctggttgaatcaggtggcggcctggttcaacctggcggatctctgagactgagctgtgccgccagcggctacacctttaccgagtacacaatccactgggtccgacaggcccctggcaaaggacttgagtgggtcgccaacatcaaccccaacaatggcggcaccacctacaaccagaagttcgaggacagattcaccatcagccgggacaacagcaagaacaccctgtacctccagatgaactccctgagagccgaggacaccgccgtgtactattgtgccagaggctggaacttcgactactggggccagggaacactggtcaccgttagctctacgcgtaccacgacgccagcgccgcgaccaccaacaccggcgcccaccatcgcgtcgcagcccctgtccctgcgcccagaggcgtgccggccagcggcggggggcgcagtgcacacgagggggctggacttcgcctgtgacatctacatctgggcgcccttggccgggacttgtggggtccttctcctgtcactggttatcaccctttactgcaaacggggcagaaagaaactcctgtatatattcaaacaaccatttatgagaccagtacaaactactcaagaggaagatggctgtagctgccgatttccagaagaagaagaaggaggatgtgaactgagagtgaagttcagcaggagcgcagacgcccccgcgtaccagcagggccagaaccagctctataacgagctgaatctaggacgaagagaggagtacgatgttttggacaagagacgtggccgggaccctgagatggggggaaagccgagaaggaagaaccctcaggaaggcctgtacaatgaactgcagaaagataagatggcggaggcctacagtgagattgggatgaaaggcgagcgccggaggggcaaggggcacgatggcctttaccagggtctcagtacagccaccaaggacacctacgacgcccttcacatgcaggccctgccccctcgctaa

SEQ ID NO: 8413 - DNA, 1488 bp, synthetic construct
  source 1..1488: mol_type = other DNA
atggccttaccagtgaccgccttgctcctgccgctggccttgctgctccacgccgccaggccgcgcagcgagaagcgctacaagggaggcagcggagacatccagatgacacagagccctagcagcctgtctgccagcgtgggagacagagtgaccatcacatgcaaggccagccaggatgtgggcacagccgtggattggtatcagcagaagcctggcaaggcccctaagctgctgatctactgggccagcacaagacacacaggcgtgcccagcagattttctggcagcggctctggcaccgacttcaccctgacaatatccagcctccagcctgaggacttcgccacctactactgccagcagtacaacagctaccctctgaccttcggccagggcaccaaggtggaaatcaaaagaggcggaggcggatctggcggcggaggtagcggtggcggaggatctgaagtgcagctggttgaatcaggtggcggcctggttcaacctggcggatctctgagactgagctgtgccgccagcggctacacctttaccgagtacacaatccactgggtccgacaggcccctggcaaaggacttgagtgggtcgccaacatcaaccccaacaatggcggcaccacctacaaccagaagttcgaggacagattcaccatcagccgggacaacagcaagaacaccctgtacctccagatgaactccctgagagccgaggacaccgccgtgtactattgtgccagaggctggaacttcgactactggggccagggaacactggtcaccgttagctctacgcgtaccacgacgccagcgccgcgaccaccaacaccggcgcccaccatcgcgtcgcagcccctgtccctgcgcccagaggcgtgccggccagcggcggggggcgcagtgcacacgagggggctggacttcgcctgtgacatctacatctgggcgcccttggccgggacttgtggggtccttctcctgtcactggttatcaccctttactgcaaacggggcagaaagaaactcctgtatatattcaaacaaccatttatgagaccagtacaaactactcaagaggaagatggctgtagctgccgatttccagaagaagaagaaggaggatgtgaactgagagtgaagttcagcaggagcgcagacgcccccgcgtaccagcagggccagaaccagctctataacgagctgaatctaggacgaagagaggagtacgatgttttggacaagagacgtggccgggaccctgagatggggggaaagccgagaaggaagaaccctcaggaaggcctgtacaatgaactgcagaaagataagatggcggaggcctacagtgagattgggatgaaaggcgagcgccggaggggcaaggggcacgatggcctttaccagggtctcagtacagccaccaaggacacctacgacgcccttcacatgcaggccctgccccctcgctaa

SEQ ID NO: 8414 - DNA, 1488 bp, synthetic construct
  source 1..1488: mol_type = other DNA
atggccttaccagtgaccgccttgctcctgccgctggccttgctgctccacgccgccaggccgcgcagcgagctgcgctacaagggaggcagcggagacatccagatgacacagagccctagcagcctgtctgccagcgtgggagacagagtgaccatcacatgcaaggccagccaggatgtgggcacagccgtggattggtatcagcagaagcctggcaaggcccctaagctgctgatctactgggccagcacaagacacacaggcgtgcccagcagattttctggcagcggctctggcaccgacttcaccctgacaatatccagcctccagcctgaggacttcgccacctactactgccagcagtacaacagctaccctctgaccttcggccagggcaccaaggtggaaatcaaaagaggcggaggcggatctggcggcggaggtagcggtggcggaggatctgaagtgcagctggttgaatcaggtggcggcctggttcaacctggcggatctctgagactgagctgtgccgccagcggctacacctttaccgagtacacaatccactgggtccgacaggcccctggcaaaggacttgagtgggtcgccaacatcaaccccaacaatggcggcaccacctacaaccagaagttcgaggacagattcaccatcagccgggacaacagcaagaacaccctgtacctccagatgaactccctgagagccgaggacaccgccgtgtactattgtgccagaggctggaacttcgactactggggccagggaacactggtcaccgttagctctacgcgtaccacgacgccagcgccgcgaccaccaacaccggcgcccaccatcgcgtcgcagcccctgtccctgcgcccagaggcgtgccggccagcggcggggggcgcagtgcacacgagggggctggacttcgcctgtgacatctacatctgggcgcccttggccgggacttgtggggtccttctcctgtcactggttatcaccctttactgcaaacggggcagaaagaaactcctgtatatattcaaacaaccatttatgagaccagtacaaactactcaagaggaagatggctgtagctgccgatttccagaagaagaagaaggaggatgtgaactgagagtgaagttcagcaggagcgcagacgcccccgcgtaccagcagggccagaaccagctctataacgagctgaatctaggacgaagagaggagtacgatgttttggacaagagacgtggccgggaccctgagatggggggaaagccgagaaggaagaaccctcaggaaggcctgtacaatgaactgcagaaagataagatggcggaggcctacagtgagattgggatgaaaggcgagcgccggaggggcaaggggcacgatggcctttaccagggtctcagtacagccaccaaggacacctacgacgcccttcacatgcaggccctgccccctcgctaa

SEQ ID NO: 8415 - DNA, 1488 bp, synthetic construct
  source 1..1488: mol_type = other DNA
atggccttaccagtgaccgccttgctcctgccgctggccttgctgctccacgccgccaggccgcgcagcgagacccgctacaagggaggcagcggagacatccagatgacacagagccctagcagcctgtctgccagcgtgggagacagagtgaccatcacatgcaaggccagccaggatgtgggcacagccgtggattggtatcagcagaagcctggcaaggcccctaagctgctgatctactgggccagcacaagacacacaggcgtgcccagcagattttctggcagcggctctggcaccgacttcaccctgacaatatccagcctccagcctgaggacttcgccacctactactgccagcagtacaacagctaccctctgaccttcggccagggcaccaaggtggaaatcaaaagaggcggaggcggatctggcggcggaggtagcggtggcggaggatctgaagtgcagctggttgaatcaggtggcggcctggttcaacctggcggatctctgagactgagctgtgccgccagcggctacacctttaccgagtacacaatccactgggtccgacaggcccctggcaaaggacttgagtgggtcgccaacatcaaccccaacaatggcggcaccacctacaaccagaagttcgaggacagattcaccatcagccgggacaacagcaagaacaccctgtacctccagatgaactccctgagagccgaggacaccgccgtgtactattgtgccagaggctggaacttcgactactggggccagggaacactggtcaccgttagctctacgcgtaccacgacgccagcgccgcgaccaccaacaccggcgcccaccatcgcgtcgcagcccctgtccctgcgcccagaggcgtgccggccagcggcggggggcgcagtgcacacgagggggctggacttcgcctgtgacatctacatctgggcgcccttggccgggacttgtggggtccttctcctgtcactggttatcaccctttactgcaaacggggcagaaagaaactcctgtatatattcaaacaaccatttatgagaccagtacaaactactcaagaggaagatggctgtagctgccgatttccagaagaagaagaaggaggatgtgaactgagagtgaagttcagcaggagcgcagacgcccccgcgtaccagcagggccagaaccagctctataacgagctgaatctaggacgaagagaggagtacgatgttttggacaagagacgtggccgggaccctgagatggggggaaagccgagaaggaagaaccctcaggaaggcctgtacaatgaactgcagaaagataagatggcggaggcctacagtgagattgggatgaaaggcgagcgccggaggggcaaggggcacgatggcctttaccagggtctcagtacagccaccaaggacacctacgacgcccttcacatgcaggccctgccccctcgctaa

SEQ ID NO: 8416 - DNA, 1488 bp, synthetic construct
  source 1..1488: mol_type = other DNA
atggccttaccagtgaccgccttgctcctgccgctggccttgctgctccacgccgccaggccgcgcagcgagcagcgctacaagggaggcagcggagacatccagatgacacagagccctagcagcctgtctgccagcgtgggagacagagtgaccatcacatgcaaggccagccaggatgtgggcacagccgtggattggtatcagcagaagcctggcaaggcccctaagctgctgatctactgggccagcacaagacacacaggcgtgcccagcagattttctggcagcggctctggcaccgacttcaccctgacaatatccagcctccagcctgaggacttcgccacctactactgccagcagtacaacagctaccctctgaccttcggccagggcaccaaggtggaaatcaaaagaggcggaggcggatctggcggcggaggtagcggtggcggaggatctgaagtgcagctggttgaatcaggtggcggcctggttcaacctggcggatctctgagactgagctgtgccgccagcggctacacctttaccgagtacacaatccactgggtccgacaggcccctggcaaaggacttgagtgggtcgccaacatcaaccccaacaatggcggcaccacctacaaccagaagttcgaggacagattcaccatcagccgggacaacagcaagaacaccctgtacctccagatgaactccctgagagccgaggacaccgccgtgtactattgtgccagaggctggaacttcgactactggggccagggaacactggtcaccgttagctctacgcgtaccacgacgccagcgccgcgaccaccaacaccggcgcccaccatcgcgtcgcagcccctgtccctgcgcccagaggcgtgccggccagcggcggggggcgcagtgcacacgagggggctggacttcgcctgtgacatctacatctgggcgcccttggccgggacttgtggggtccttctcctgtcactggttatcaccctttactgcaaacggggcagaaagaaactcctgtatatattcaaacaaccatttatgagaccagtacaaactactcaagaggaagatggctgtagctgccgatttccagaagaagaagaaggaggatgtgaactgagagtgaagttcagcaggagcgcagacgcccccgcgtaccagcagggccagaaccagctctataacgagctgaatctaggacgaagagaggagtacgatgttttggacaagagacgtggccgggaccctgagatggggggaaagccgagaaggaagaaccctcaggaaggcctgtacaatgaactgcagaaagataagatggcggaggcctacagtgagattgggatgaaaggcgagcgccggaggggcaaggggcacgatggcctttaccagggtctcagtacagccaccaaggacacctacgacgcccttcacatgcaggccctgccccctcgctaa

SEQ ID NO: 8417 - DNA, 1488 bp, synthetic construct
  source 1..1488: mol_type = other DNA
atggccttaccagtgaccgccttgctcctgccgctggccttgctgctccacgccgccaggccggcccgcagcgaggaccgctacggaggcagcggagacatccagatgacacagagccctagcagcctgtctgccagcgtgggagacagagtgaccatcacatgcaaggccagccaggatgtgggcacagccgtggattggtatcagcagaagcctggcaaggcccctaagctgctgatctactgggccagcacaagacacacaggcgtgcccagcagattttctggcagcggctctggcaccgacttcaccctgacaatatccagcctccagcctgaggacttcgccacctactactgccagcagtacaacagctaccctctgaccttcggccagggcaccaaggtggaaatcaaaagaggcggaggcggatctggcggcggaggtagcggtggcggaggatctgaagtgcagctggttgaatcaggtggcggcctggttcaacctggcggatctctgagactgagctgtgccgccagcggctacacctttaccgagtacacaatccactgggtccgacaggcccctggcaaaggacttgagtgggtcgccaacatcaaccccaacaatggcggcaccacctacaaccagaagttcgaggacagattcaccatcagccgggacaacagcaagaacaccctgtacctccagatgaactccctgagagccgaggacaccgccgtgtactattgtgccagaggctggaacttcgactactggggccagggaacactggtcaccgttagctctacgcgtaccacgacgccagcgccgcgaccaccaacaccggcgcccaccatcgcgtcgcagcccctgtccctgcgcccagaggcgtgccggccagcggcggggggcgcagtgcacacgagggggctggacttcgcctgtgacatctacatctgggcgcccttggccgggacttgtggggtccttctcctgtcactggttatcaccctttactgcaaacggggcagaaagaaactcctgtatatattcaaacaaccatttatgagaccagtacaaactactcaagaggaagatggctgtagctgccgatttccagaagaagaagaaggaggatgtgaactgagagtgaagttcagcaggagcgcagacgcccccgcgtaccagcagggccagaaccagctctataacgagctgaatctaggacgaagagaggagtacgatgttttggacaagagacgtggccgggaccctgagatggggggaaagccgagaaggaagaaccctcaggaaggcctgtacaatgaactgcagaaagataagatggcggaggcctacagtgagattgggatgaaaggcgagcgccggaggggcaaggggcacgatggcctttaccagggtctcagtacagccaccaaggacacctacgacgcccttcacatgcaggccctgccccctcgctaa

SEQ ID NO: 8418 - DNA, 1491 bp, synthetic construct
  source 1..1491: mol_type = other DNA
atggccttaccagtgaccgccttgctcctgccgctggccttgctgctccacgccgccaggccggcccgcagcgaggaccgctaccgcggaggcagcggagacatccagatgacacagagccctagcagcctgtctgccagcgtgggagacagagtgaccatcacatgcaaggccagccaggatgtgggcacagccgtggattggtatcagcagaagcctggcaaggcccctaagctgctgatctactgggccagcacaagacacacaggcgtgcccagcagattttctggcagcggctctggcaccgacttcaccctgacaatatccagcctccagcctgaggacttcgccacctactactgccagcagtacaacagctaccctctgaccttcggccagggcaccaaggtggaaatcaaaagaggcggaggcggatctggcggcggaggtagcggtggcggaggatctgaagtgcagctggttgaatcaggtggcggcctggttcaacctggcggatctctgagactgagctgtgccgccagcggctacacctttaccgagtacacaatccactgggtccgacaggcccctggcaaaggacttgagtgggtcgccaacatcaaccccaacaatggcggcaccacctacaaccagaagttcgaggacagattcaccatcagccgggacaacagcaagaacaccctgtacctccagatgaactccctgagagccgaggacaccgccgtgtactattgtgccagaggctggaacttcgactactggggccagggaacactggtcaccgttagctctacgcgtaccacgacgccagcgccgcgaccaccaacaccggcgcccaccatcgcgtcgcagcccctgtccctgcgcccagaggcgtgccggccagcggcggggggcgcagtgcacacgagggggctggacttcgcctgtgacatctacatctgggcgcccttggccgggacttgtggggtccttctcctgtcactggttatcaccctttactgcaaacggggcagaaagaaactcctgtatatattcaaacaaccatttatgagaccagtacaaactactcaagaggaagatggctgtagctgccgatttccagaagaagaagaaggaggatgtgaactgagagtgaagttcagcaggagcgcagacgcccccgcgtaccagcagggccagaaccagctctataacgagctgaatctaggacgaagagaggagtacgatgttttggacaagagacgtggccgggaccctgagatggggggaaagccgagaaggaagaaccctcaggaaggcctgtacaatgaactgcagaaagataagatggcggaggcctacagtgagattgggatgaaaggcgagcgccggaggggcaaggggcacgatggcctttaccagggtctcagtacagccaccaaggacacctacgacgcccttcacatgcaggccctgccccctcgctaa

SEQ ID NO: 8419 - DNA, 1494 bp, synthetic construct
  source 1..1494: mol_type = other DNA
atggccttaccagtgaccgccttgctcctgccgctggccttgctgctccacgccgccaggccggcccgcagcgaggaccgctaccgcaacggaggcagcggagacatccagatgacacagagccctagcagcctgtctgccagcgtgggagacagagtgaccatcacatgcaaggccagccaggatgtgggcacagccgtggattggtatcagcagaagcctggcaaggcccctaagctgctgatctactgggccagcacaagacacacaggcgtgcccagcagattttctggcagcggctctggcaccgacttcaccctgacaatatccagcctccagcctgaggacttcgccacctactactgccagcagtacaacagctaccctctgaccttcggccagggcaccaaggtggaaatcaaaagaggcggaggcggatctggcggcggaggtagcggtggcggaggatctgaagtgcagctggttgaatcaggtggcggcctggttcaacctggcggatctctgagactgagctgtgccgccagcggctacacctttaccgagtacacaatccactgggtccgacaggcccctggcaaaggacttgagtgggtcgccaacatcaaccccaacaatggcggcaccacctacaaccagaagttcgaggacagattcaccatcagccgggacaacagcaagaacaccctgtacctccagatgaactccctgagagccgaggacaccgccgtgtactattgtgccagaggctggaacttcgactactggggccagggaacactggtcaccgttagctctacgcgtaccacgacgccagcgccgcgaccaccaacaccggcgcccaccatcgcgtcgcagcccctgtccctgcgcccagaggcgtgccggccagcggcggggggcgcagtgcacacgagggggctggacttcgcctgtgacatctacatctgggcgcccttggccgggacttgtggggtccttctcctgtcactggttatcaccctttactgcaaacggggcagaaagaaactcctgtatatattcaaacaaccatttatgagaccagtacaaactactcaagaggaagatggctgtagctgccgatttccagaagaagaagaaggaggatgtgaactgagagtgaagttcagcaggagcgcagacgcccccgcgtaccagcagggccagaaccagctctataacgagctgaatctaggacgaagagaggagtacgatgttttggacaagagacgtggccgggaccctgagatggggggaaagccgagaaggaagaaccctcaggaaggcctgtacaatgaactgcagaaagataagatggcggaggcctacagtgagattgggatgaaaggcgagcgccggaggggcaaggggcacgatggcctttaccagggtctcagtacagccaccaaggacacctacgacgcccttcacatgcaggccctgccccctcgctaa

SEQ ID NO: 8420 - DNA, 1497 bp, synthetic construct
  source 1..1497: mol_type = other DNA
atggccttaccagtgaccgccttgctcctgccgctggccttgctgctccacgccgccaggccggcccgcagcgaggaccgctaccgcaaccccggaggcagcggagacatccagatgacacagagccctagcagcctgtctgccagcgtgggagacagagtgaccatcacatgcaaggccagccaggatgtgggcacagccgtggattggtatcagcagaagcctggcaaggcccctaagctgctgatctactgggccagcacaagacacacaggcgtgcccagcagattttctggcagcggctctggcaccgacttcaccctgacaatatccagcctccagcctgaggacttcgccacctactactgccagcagtacaacagctaccctctgaccttcggccagggcaccaaggtggaaatcaaaagaggcggaggcggatctggcggcggaggtagcggtggcggaggatctgaagtgcagctggttgaatcaggtggcggcctggttcaacctggcggatctctgagactgagctgtgccgccagcggctacacctttaccgagtacacaatccactgggtccgacaggcccctggcaaaggacttgagtgggtcgccaacatcaaccccaacaatggcggcaccacctacaaccagaagttcgaggacagattcaccatcagccgggacaacagcaagaacaccctgtacctccagatgaactccctgagagccgaggacaccgccgtgtactattgtgccagaggctggaacttcgactactggggccagggaacactggtcaccgttagctctacgcgtaccacgacgccagcgccgcgaccaccaacaccggcgcccaccatcgcgtcgcagcccctgtccctgcgcccagaggcgtgccggccagcggcggggggcgcagtgcacacgagggggctggacttcgcctgtgacatctacatctgggcgcccttggccgggacttgtggggtccttctcctgtcactggttatcaccctttactgcaaacggggcagaaagaaactcctgtatatattcaaacaaccatttatgagaccagtacaaactactcaagaggaagatggctgtagctgccgatttccagaagaagaagaaggaggatgtgaactgagagtgaagttcagcaggagcgcagacgcccccgcgtaccagcagggccagaaccagctctataacgagctgaatctaggacgaagagaggagtacgatgttttggacaagagacgtggccgggaccctgagatggggggaaagccgagaaggaagaaccctcaggaaggcctgtacaatgaactgcagaaagataagatggcggaggcctacagtgagattgggatgaaaggcgagcgccggaggggcaaggggcacgatggcctttaccagggtctcagtacagccaccaaggacacctacgacgcccttcacatgcaggccctgccccctcgctaa

SEQ ID NO: 8421 - DNA, 1500 bp, synthetic construct
  source 1..1500: mol_type = other DNA
atggccttaccagtgaccgccttgctcctgccgctggccttgctgctccacgccgccaggccggcccgcagcgaggaccgctaccgcaaccccaagggaggcagcggagacatccagatgacacagagccctagcagcctgtctgccagcgtgggagacagagtgaccatcacatgcaaggccagccaggatgtgggcacagccgtggattggtatcagcagaagcctggcaaggcccctaagctgctgatctactgggccagcacaagacacacaggcgtgcccagcagattttctggcagcggctctggcaccgacttcaccctgacaatatccagcctccagcctgaggacttcgccacctactactgccagcagtacaacagctaccctctgaccttcggccagggcaccaaggtggaaatcaaaagaggcggaggcggatctggcggcggaggtagcggtggcggaggatctgaagtgcagctggttgaatcaggtggcggcctggttcaacctggcggatctctgagactgagctgtgccgccagcggctacacctttaccgagtacacaatccactgggtccgacaggcccctggcaaaggacttgagtgggtcgccaacatcaaccccaacaatggcggcaccacctacaaccagaagttcgaggacagattcaccatcagccgggacaacagcaagaacaccctgtacctccagatgaactccctgagagccgaggacaccgccgtgtactattgtgccagaggctggaacttcgactactggggccagggaacactggtcaccgttagctctacgcgtaccacgacgccagcgccgcgaccaccaacaccggcgcccaccatcgcgtcgcagcccctgtccctgcgcccagaggcgtgccggccagcggcggggggcgcagtgcacacgagggggctggacttcgcctgtgacatctacatctgggcgcccttggccgggacttgtggggtccttctcctgtcactggttatcaccctttactgcaaacggggcagaaagaaactcctgtatatattcaaacaaccatttatgagaccagtacaaactactcaagaggaagatggctgtagctgccgatttccagaagaagaagaaggaggatgtgaactgagagtgaagttcagcaggagcgcagacgcccccgcgtaccagcagggccagaaccagctctataacgagctgaatctaggacgaagagaggagtacgatgttttggacaagagacgtggccgggaccctgagatggggggaaagccgagaaggaagaaccctcaggaaggcctgtacaatgaactgcagaaagataagatggcggaggcctacagtgagattgggatgaaaggcgagcgccggaggggcaaggggcacgatggcctttaccagggtctcagtacagccaccaaggacacctacgacgcccttcacatgcaggccctgccccctcgctaa

SEQ ID NO: 8422 - DNA, 1503 bp, synthetic construct
  source 1..1503: mol_type = other DNA
atggccttaccagtgaccgccttgctcctgccgctggccttgctgctccacgccgccaggccggcccgcagcgaggaccgctaccgcaaccccaagggcggaggcagcggagacatccagatgacacagagccctagcagcctgtctgccagcgtgggagacagagtgaccatcacatgcaaggccagccaggatgtgggcacagccgtggattggtatcagcagaagcctggcaaggcccctaagctgctgatctactgggccagcacaagacacacaggcgtgcccagcagattttctggcagcggctctggcaccgacttcaccctgacaatatccagcctccagcctgaggacttcgccacctactactgccagcagtacaacagctaccctctgaccttcggccagggcaccaaggtggaaatcaaaagaggcggaggcggatctggcggcggaggtagcggtggcggaggatctgaagtgcagctggttgaatcaggtggcggcctggttcaacctggcggatctctgagactgagctgtgccgccagcggctacacctttaccgagtacacaatccactgggtccgacaggcccctggcaaaggacttgagtgggtcgccaacatcaaccccaacaatggcggcaccacctacaaccagaagttcgaggacagattcaccatcagccgggacaacagcaagaacaccctgtacctccagatgaactccctgagagccgaggacaccgccgtgtactattgtgccagaggctggaacttcgactactggggccagggaacactggtcaccgttagctctacgcgtaccacgacgccagcgccgcgaccaccaacaccggcgcccaccatcgcgtcgcagcccctgtccctgcgcccagaggcgtgccggccagcggcggggggcgcagtgcacacgagggggctggacttcgcctgtgacatctacatctgggcgcccttggccgggacttgtggggtccttctcctgtcactggttatcaccctttactgcaaacggggcagaaagaaactcctgtatatattcaaacaaccatttatgagaccagtacaaactactcaagaggaagatggctgtagctgccgatttccagaagaagaagaaggaggatgtgaactgagagtgaagttcagcaggagcgcagacgcccccgcgtaccagcagggccagaaccagctctataacgagctgaatctaggacgaagagaggagtacgatgttttggacaagagacgtggccgggaccctgagatggggggaaagccgagaaggaagaaccctcaggaaggcctgtacaatgaactgcagaaagataagatggcggaggcctacagtgagattgggatgaaaggcgagcgccggaggggcaaggggcacgatggcctttaccagggtctcagtacagccaccaaggacacctacgacgcccttcacatgcaggccctgccccctcgctaa

SEQ ID NO: 8423 - DNA, 1506 bp, synthetic construct
  source 1..1506: mol_type = other DNA
atggccttaccagtgaccgccttgctcctgccgctggccttgctgctccacgccgccaggccggcccgcagcgaggaccgctaccgcaaccccaagggcagcggaggcagcggagacatccagatgacacagagccctagcagcctgtctgccagcgtgggagacagagtgaccatcacatgcaaggccagccaggatgtgggcacagccgtggattggtatcagcagaagcctggcaaggcccctaagctgctgatctactgggccagcacaagacacacaggcgtgcccagcagattttctggcagcggctctggcaccgacttcaccctgacaatatccagcctccagcctgaggacttcgccacctactactgccagcagtacaacagctaccctctgaccttcggccagggcaccaaggtggaaatcaaaagaggcggaggcggatctggcggcggaggtagcggtggcggaggatctgaagtgcagctggttgaatcaggtggcggcctggttcaacctggcggatctctgagactgagctgtgccgccagcggctacacctttaccgagtacacaatccactgggtccgacaggcccctggcaaaggacttgagtgggtcgccaacatcaaccccaacaatggcggcaccacctacaaccagaagttcgaggacagattcaccatcagccgggacaacagcaagaacaccctgtacctccagatgaactccctgagagccgaggacaccgccgtgtactattgtgccagaggctggaacttcgactactggggccagggaacactggtcaccgttagctctacgcgtaccacgacgccagcgccgcgaccaccaacaccggcgcccaccatcgcgtcgcagcccctgtccctgcgcccagaggcgtgccggccagcggcggggggcgcagtgcacacgagggggctggacttcgcctgtgacatctacatctgggcgcccttggccgggacttgtggggtccttctcctgtcactggttatcaccctttactgcaaacggggcagaaagaaactcctgtatatattcaaacaaccatttatgagaccagtacaaactactcaagaggaagatggctgtagctgccgatttccagaagaagaagaaggaggatgtgaactgagagtgaagttcagcaggagcgcagacgcccccgcgtaccagcagggccagaaccagctctataacgagctgaatctaggacgaagagaggagtacgatgttttggacaagagacgtggccgggaccctgagatggggggaaagccgagaaggaagaaccctcaggaaggcctgtacaatgaactgcagaaagataagatggcggaggcctacagtgagattgggatgaaaggcgagcgccggaggggcaaggggcacgatggcctttaccagggtctcagtacagccaccaaggacacctacgacgcccttcacatgcaggccctgccccctcgctaa

SEQ ID NO: 8424 - DNA, 1509 bp, synthetic construct
  source 1..1509: mol_type = other DNA
atggccttaccagtgaccgccttgctcctgccgctggccttgctgctccacgccgccaggccggcccgcagcgaggaccgctaccgcaaccccaagggcagcgccggaggcagcggagacatccagatgacacagagccctagcagcctgtctgccagcgtgggagacagagtgaccatcacatgcaaggccagccaggatgtgggcacagccgtggattggtatcagcagaagcctggcaaggcccctaagctgctgatctactgggccagcacaagacacacaggcgtgcccagcagattttctggcagcggctctggcaccgacttcaccctgacaatatccagcctccagcctgaggacttcgccacctactactgccagcagtacaacagctaccctctgaccttcggccagggcaccaaggtggaaatcaaaagaggcggaggcggatctggcggcggaggtagcggtggcggaggatctgaagtgcagctggttgaatcaggtggcggcctggttcaacctggcggatctctgagactgagctgtgccgccagcggctacacctttaccgagtacacaatccactgggtccgacaggcccctggcaaaggacttgagtgggtcgccaacatcaaccccaacaatggcggcaccacctacaaccagaagttcgaggacagattcaccatcagccgggacaacagcaagaacaccctgtacctccagatgaactccctgagagccgaggacaccgccgtgtactattgtgccagaggctggaacttcgactactggggccagggaacactggtcaccgttagctctacgcgtaccacgacgccagcgccgcgaccaccaacaccggcgcccaccatcgcgtcgcagcccctgtccctgcgcccagaggcgtgccggccagcggcggggggcgcagtgcacacgagggggctggacttcgcctgtgacatctacatctgggcgcccttggccgggacttgtggggtccttctcctgtcactggttatcaccctttactgcaaacggggcagaaagaaactcctgtatatattcaaacaaccatttatgagaccagtacaaactactcaagaggaagatggctgtagctgccgatttccagaagaagaagaaggaggatgtgaactgagagtgaagttcagcaggagcgcagacgcccccgcgtaccagcagggccagaaccagctctataacgagctgaatctaggacgaagagaggagtacgatgttttggacaagagacgtggccgggaccctgagatggggggaaagccgagaaggaagaaccctcaggaaggcctgtacaatgaactgcagaaagataagatggcggaggcctacagtgagattgggatgaaaggcgagcgccggaggggcaaggggcacgatggcctttaccagggtctcagtacagccaccaaggacacctacgacgcccttcacatgcaggccctgccccctcgctaa

SEQ ID NO: 8425 - DNA, 1512 bp, synthetic construct
  source 1..1512: mol_type = other DNA
atggccttaccagtgaccgccttgctcctgccgctggccttgctgctccacgccgccaggccggcccgcagcgaggaccgctaccgcaaccccaagggcagcgcctgcggaggcagcggagacatccagatgacacagagccctagcagcctgtctgccagcgtgggagacagagtgaccatcacatgcaaggccagccaggatgtgggcacagccgtggattggtatcagcagaagcctggcaaggcccctaagctgctgatctactgggccagcacaagacacacaggcgtgcccagcagattttctggcagcggctctggcaccgacttcaccctgacaatatccagcctccagcctgaggacttcgccacctactactgccagcagtacaacagctaccctctgaccttcggccagggcaccaaggtggaaatcaaaagaggcggaggcggatctggcggcggaggtagcggtggcggaggatctgaagtgcagctggttgaatcaggtggcggcctggttcaacctggcggatctctgagactgagctgtgccgccagcggctacacctttaccgagtacacaatccactgggtccgacaggcccctggcaaaggacttgagtgggtcgccaacatcaaccccaacaatggcggcaccacctacaaccagaagttcgaggacagattcaccatcagccgggacaacagcaagaacaccctgtacctccagatgaactccctgagagccgaggacaccgccgtgtactattgtgccagaggctggaacttcgactactggggccagggaacactggtcaccgttagctctacgcgtaccacgacgccagcgccgcgaccaccaacaccggcgcccaccatcgcgtcgcagcccctgtccctgcgcccagaggcgtgccggccagcggcggggggcgcagtgcacacgagggggctggacttcgcctgtgacatctacatctgggcgcccttggccgggacttgtggggtccttctcctgtcactggttatcaccctttactgcaaacggggcagaaagaaactcctgtatatattcaaacaaccatttatgagaccagtacaaactactcaagaggaagatggctgtagctgccgatttccagaagaagaagaaggaggatgtgaactgagagtgaagttcagcaggagcgcagacgcccccgcgtaccagcagggccagaaccagctctataacgagctgaatctaggacgaagagaggagtacgatgttttggacaagagacgtggccgggaccctgagatggggggaaagccgagaaggaagaaccctcaggaaggcctgtacaatgaactgcagaaagataagatggcggaggcctacagtgagattgggatgaaaggcgagcgccggaggggcaaggggcacgatggcctttaccagggtctcagtacagccaccaaggacacctacgacgcccttcacatgcaggccctgccccctcgctaa

SEQ ID NO: 8426 - DNA, 1515 bp, synthetic construct
  source 1..1515: mol_type = other DNA
atggccttaccagtgaccgccttgctcctgccgctggccttgctgctccacgccgccaggccggcccgcagcgaggaccgctaccgcaaccccaagggcagcgcctgcaagggaggcagcggagacatccagatgacacagagccctagcagcctgtctgccagcgtgggagacagagtgaccatcacatgcaaggccagccaggatgtgggcacagccgtggattggtatcagcagaagcctggcaaggcccctaagctgctgatctactgggccagcacaagacacacaggcgtgcccagcagattttctggcagcggctctggcaccgacttcaccctgacaatatccagcctccagcctgaggacttcgccacctactactgccagcagtacaacagctaccctctgaccttcggccagggcaccaaggtggaaatcaaaagaggcggaggcggatctggcggcggaggtagcggtggcggaggatctgaagtgcagctggttgaatcaggtggcggcctggttcaacctggcggatctctgagactgagctgtgccgccagcggctacacctttaccgagtacacaatccactgggtccgacaggcccctggcaaaggacttgagtgggtcgccaacatcaaccccaacaatggcggcaccacctacaaccagaagttcgaggacagattcaccatcagccgggacaacagcaagaacaccctgtacctccagatgaactccctgagagccgaggacaccgccgtgtactattgtgccagaggctggaacttcgactactggggccagggaacactggtcaccgttagctctacgcgtaccacgacgccagcgccgcgaccaccaacaccggcgcccaccatcgcgtcgcagcccctgtccctgcgcccagaggcgtgccggccagcggcggggggcgcagtgcacacgagggggctggacttcgcctgtgacatctacatctgggcgcccttggccgggacttgtggggtccttctcctgtcactggttatcaccctttactgcaaacggggcagaaagaaactcctgtatatattcaaacaaccatttatgagaccagtacaaactactcaagaggaagatggctgtagctgccgatttccagaagaagaagaaggaggatgtgaactgagagtgaagttcagcaggagcgcagacgcccccgcgtaccagcagggccagaaccagctctataacgagctgaatctaggacgaagagaggagtacgatgttttggacaagagacgtggccgggaccctgagatggggggaaagccgagaaggaagaaccctcaggaaggcctgtacaatgaactgcagaaagataagatggcggaggcctacagtgagattgggatgaaaggcgagcgccggaggggcaaggggcacgatggcctttaccagggtctcagtacagccaccaaggacacctacgacgcccttcacatgcaggccctgccccctcgctaa

SEQ ID NO: 8427 - DNA, 1515 bp, synthetic construct
  source 1..1515: mol_type = other DNA
atggccttaccagtgaccgccttgctcctgccgctggccttgctgctccacgccgccaggccggcccgcagcgaggaccgctaccgcaaccccaagggcagcgcctgcagcggaggcagcggagacatccagatgacacagagccctagcagcctgtctgccagcgtgggagacagagtgaccatcacatgcaaggccagccaggatgtgggcacagccgtggattggtatcagcagaagcctggcaaggcccctaagctgctgatctactgggccagcacaagacacacaggcgtgcccagcagattttctggcagcggctctggcaccgacttcaccctgacaatatccagcctccagcctgaggacttcgccacctactactgccagcagtacaacagctaccctctgaccttcggccagggcaccaaggtggaaatcaaaagaggcggaggcggatctggcggcggaggtagcggtggcggaggatctgaagtgcagctggttgaatcaggtggcggcctggttcaacctggcggatctctgagactgagctgtgccgccagcggctacacctttaccgagtacacaatccactgggtccgacaggcccctggcaaaggacttgagtgggtcgccaacatcaaccccaacaatggcggcaccacctacaaccagaagttcgaggacagattcaccatcagccgggacaacagcaagaacaccctgtacctccagatgaactccctgagagccgaggacaccgccgtgtactattgtgccagaggctggaacttcgactactggggccagggaacactggtcaccgttagctctacgcgtaccacgacgccagcgccgcgaccaccaacaccggcgcccaccatcgcgtcgcagcccctgtccctgcgcccagaggcgtgccggccagcggcggggggcgcagtgcacacgagggggctggacttcgcctgtgacatctacatctgggcgcccttggccgggacttgtggggtccttctcctgtcactggttatcaccctttactgcaaacggggcagaaagaaactcctgtatatattcaaacaaccatttatgagaccagtacaaactactcaagaggaagatggctgtagctgccgatttccagaagaagaagaaggaggatgtgaactgagagtgaagttcagcaggagcgcagacgcccccgcgtaccagcagggccagaaccagctctataacgagctgaatctaggacgaagagaggagtacgatgttttggacaagagacgtggccgggaccctgagatggggggaaagccgagaaggaagaaccctcaggaaggcctgtacaatgaactgcagaaagataagatggcggaggcctacagtgagattgggatgaaaggcgagcgccggaggggcaaggggcacgatggcctttaccagggtctcagtacagccaccaaggacacctacgacgcccttcacatgcaggccctgccccctcgctaa

SEQ ID NO: 8428 - DNA, 1500 bp, synthetic construct; identical to SEQ ID NO: 8421
  source 1..1500: mol_type = other DNA

SEQ ID NO: 8429 - DNA, 1500 bp, synthetic construct
  source 1..1500: mol_type = other DNA
atggccttaccagtgaccgccttgctcctgccgctggccttgctgctccacgccgccaggccggcccgcagcgacgaccgctaccgcaaccccaagggaggcagcggagacatccagatgacacagagccctagcagcctgtctgccagcgtgggagacagagtgaccatcacatgcaaggccagccaggatgtgggcacagccgtggattggtatcagcagaagcctggcaaggcccctaagctgctgatctactgggccagcacaagacacacaggcgtgcccagcagattttctggcagcggctctggcaccgacttcaccctgacaatatccagcctccagcctgaggacttcgccacctactactgccagcagtacaacagctaccctctgaccttcggccagggcaccaaggtggaaatcaaaagaggcggaggcggatctggcggcggaggtagcggtggcggaggatctgaagtgcagctggttgaatcaggtggcggcctggttcaacctggcggatctctgagactgagctgtgccgccagcggctacacctttaccgagtacacaatccactgggtccgacaggcccctggcaaaggacttgagtgggtcgccaacatcaaccccaacaatggcggcaccacctacaaccagaagttcgaggacagattcaccatcagccgggacaacagcaagaacaccctgtacctccagatgaactccctgagagccgaggacaccgccgtgtactattgtgccagaggctggaacttcgactactggggccagggaacactggtcaccgttagctctacgcgtaccacgacgccagcgccgcgaccaccaacaccggcgcccaccatcgcgtcgcagcccctgtccctgcgcccagaggcgtgccggccagcggcggggggcgcagtgcacacgagggggctggacttcgcctgtgacatctacatctgggcgcccttggccgggacttgtggggtccttctcctgtcactggttatcaccctttactgcaaacggggcagaaagaaactcctgtatatattcaaacaaccatttatgagaccagtacaaactactcaagaggaagatggctgtagctgccgatttccagaagaagaagaaggaggatgtgaactgagagtgaagttcagcaggagcgcagacgcccccgcgtaccagcagggccagaaccagctctataacgagctgaatctaggacgaagagaggagtacgatgttttggacaagagacgtggccgggaccctgagatggggggaaagccgagaaggaagaaccctcaggaaggcctgtacaatgaactgcagaaagataagatggcggaggcctacagtgagattgggatgaaaggcgagcgccggaggggcaaggggcacgatggcctttaccagggtctcagtacagccaccaaggacacctacgacgcccttcacatgcaggccctgccccctcgctaa

SEQ ID NO: 8430 - DNA, 1500 bp, synthetic construct
  source 1..1500: mol_type = other DNA
atggccttaccagtgaccgccttgctcctgccgctggccttgctgctccacgccgccaggccggcccgcagcgacgagcgctaccgcaaccccaagggaggcagcggagacatccagatgacacagagccctagcagcctgtctgccagcgtgggagacagagtgaccatcacatgcaaggccagccaggatgtgggcacagccgtggattggtatcagcagaagcctggcaaggcccctaagctgctgatctactgggccagcacaagacacacaggcgtgcccagcagattttctggcagcggctctggcaccgacttcaccctgacaatatccagcctccagcctgaggacttcgccacctactactgccagcagtacaacagctaccctctgaccttcggccagggcaccaaggtggaaatcaaaagaggcggaggcggatctggcggcggaggtagcggtggcggaggatctgaagtgcagctggttgaatcaggtggcggcctggttcaacctggcggatctctgagactgagctgtgccgccagcggctacacctttaccgagtacacaatccactgggtccgacaggcccctggcaaaggacttgagtgggtcgccaacatcaaccccaacaatggcggcaccacctacaaccagaagttcgaggacagattcaccatcagccgggacaacagcaagaacaccctgtacctccagatgaactccctgagagccgaggacaccgccgtgtactattgtgccagaggctggaacttcgactactggggccagggaacactggtcaccgttagctctacgcgtaccacgacgccagcgccgcgaccaccaacaccggcgcccaccatcgcgtcgcagcccctgtccctgcgcccagaggcgtgccggccagcggcggggggcgcagtgcacacgagggggctggacttcgcctgtgacatctacatctgggcgcccttggccgggacttgtggggtccttctcctgtcactggttatcaccctttactgcaaacggggcagaaagaaactcctgtatatattcaaacaaccatttatgagaccagtacaaactactcaagaggaagatggctgtagctgccgatttccagaagaagaagaaggaggatgtgaactgagagtgaagttcagcaggagcgcagacgcccccgcgtaccagcagggccagaaccagctctataacgagctgaatctaggacgaagagaggagtacgatgttttggacaagagacgtggccgggaccctgagatggggggaaagccgagaaggaagaaccctcaggaaggcctgtacaatgaactgcagaaagataagatggcggaggcctacagtgagattgggatgaaaggcgagcgccggaggggcaaggggcacgatggcctttaccagggtctcagtacagccaccaaggacacctacgacgcccttcacatgcaggccctgccccctcgctaa

SEQ ID NO: 8431 - DNA, 1500 bp, synthetic construct
  source 1..1500: mol_type = other DNA
atggccttaccagtgaccgccttgctcctgccgctggccttgctgctccacgccgccaggccggcccgcgccgaggaccgctaccgcaaccccaagggaggcagcggagacatccagatgacacagagccctagcagcctgtctgccagcgtgggagacagagtgaccatcacatgcaaggccagccaggatgtgggcacagccgtggattggtatcagcagaagcctggcaaggcccctaagctgctgatctactgggccagcacaagacacacaggcgtgcccagcagattttctggcagcggctctggcaccgacttcaccctgacaatatccagcctccagcctgaggacttcgccacctactactgccagcagtacaacagctaccctctgaccttcggccagggcaccaaggtggaaatcaaaagaggcggaggcggatctggcggcggaggtagcggtggcggaggatctgaagtgcagctggttgaatcaggtggcggcctggttcaacctggcggatctctgagactgagctgtgccgccagcggctacacctttaccgagtacacaatccactgggtccgacaggcccctggcaaaggacttgagtgggtcgccaacatcaaccccaacaatggcggcaccacctacaaccagaagttcgaggacagattcaccatcagccgggacaacagcaagaacaccctgtacctccagatgaactccctgagagccgaggacaccgccgtgtactattgtgccagaggctggaacttcgactactggggccagggaacactggtcaccgttagctctacgcgtaccacgacgccagcgccgcgaccaccaacaccggcgcccaccatcgcgtcgcagcccctgtccctgcgcccagaggcgtgccggccagcggcggggggcgcagtgcacacgagggggctggacttcgcctgtgacatctacatctgggcgcccttggccgggacttgtggggtccttctcctgtcactggttatcaccctttactgcaaacggggcagaaagaaactcctgtatatattcaaacaaccatttatgagaccagtacaaactactcaagaggaagatggctgtagctgccgatttccagaagaagaagaaggaggatgtgaactgagagtgaagttcagcaggagcgcagacgcccccgcgtaccagcagggccagaaccagctctataacgagctgaatctaggacgaagagaggagtacgatgttttggacaagagacgtggccgggaccctgagatggggggaaagccgagaaggaagaaccctcaggaaggcctgtacaatgaactgcagaaagataagatggcggaggcctacagtgagattgggatgaaaggcgagcgccggaggggcaaggggcacgatggcctttaccagggtctcagtacagccaccaaggacacctacgacgcccttcacatgcaggccctgccccctcgctaa

SEQ ID NO: 8432 - DNA, 1500 bp, synthetic construct
  source 1..1500: mol_type = other DNA
atggccttaccagtgaccgccttgctcctgccgctggccttgctgctccacgccgccaggccggcccgcaacgaggaccgctaccgcaaccccaagggaggcagcggagacatccagatgacacagagccctagcagcctgtctgccagcgtgggagacagagtgaccatcacatgcaaggccagccaggatgtgggcacagccgtggattggtatcagcagaagcctggcaaggcccctaagctgctgatctactgggccagcacaagacacacaggcgtgcccagcagattttctggcagcggctctggcaccgacttcaccctgacaatatccagcctccagcctgaggacttcgccacctactactgccagcagtacaacagctaccctctgaccttcggccagggcaccaaggtggaaatcaaaagaggcggaggcggatctggcggcggaggtagcggtggcggaggatctgaagtgcagctggttgaatcaggtggcggcctggttcaacctggcggatctctgagactgagctgtgccgccagcggctacacctttaccgagtacacaatccactgggtccgacaggcccctggcaaaggacttgagtgggtcgccaacatcaaccccaacaatggcggcaccacctacaaccagaagttcgaggacagattcaccatcagccgggacaacagcaagaacaccctgtacctccagatgaactccctgagagccgaggacaccgccgtgtactattgtgccagaggctggaacttcgactactggggccagggaacactggtcaccgttagctctacgcgtaccacgacgccagcgccgcgaccaccaacaccggcgcccaccatcgcgtcgcagcccctgtccctgcgcccagaggcgtgccggccagcggcggggggcgcagtgcacacgagggggctggacttcgcctgtgacatctacatctgggcgcccttggccgggacttgtggggtccttctcctgtcactggttatcaccctttactgcaaacggggcagaaagaaactcctgtatatattcaaacaaccatttatgagaccagtacaaactactcaagaggaagatggctgtagctgccgatttccagaagaagaagaaggaggatgtgaactgagagtgaagttcagcaggagcgcagacgcccccgcgtaccagcagggccagaaccagctctataacgagctgaatctaggacgaagagaggagtacgatgttttggacaagagacgtggccgggaccctgagatggggggaaagccgagaaggaagaaccctcaggaaggcctgtacaatgaactgcagaaagataagatggcggaggcctacagtgagattgggatgaaaggcgagcgccggaggggcaaggggcacgatggcctttaccagggtctcagtacagccaccaaggacacctacgacgcccttcacatgcaggccctgccccctcgctaa

SEQ ID NO: 8433 - DNA, 1500 bp, synthetic construct
  source 1..1500: mol_type = other DNA
atggccttaccagtgaccgccttgctcctgccgctggccttgctgctccacgccgccaggccggcccgcaacgaggaccgctaccgcagccccaagggaggcagcggagacatccagatgacacagagccctagcagcctgtctgccagcgtgggagacagagtgaccatcacatgcaaggccagccaggatgtgggcacagccgtggattggtatcagcagaagcctggcaaggcccctaagctgctgatctactgggccagcacaagacacacaggcgtgcccagcagattttctggcagcggctctggcaccgacttcaccctgacaatatccagcctccagcctgaggacttcgccacctactactgccagcagtacaacagctaccctctgaccttcggccagggcaccaaggtggaaatcaaaagaggcggaggcggatctggcggcggaggtagcggtggcggaggatctgaagtgcagctggttgaatcaggtggcggcctggttcaacctggcggatctctgagactgagctgtgccgccagcggctacacctttaccgagtacacaatccactgggtccgacaggcccctggcaaaggacttgagtgggtcgccaacatcaaccccaacaatggcggcaccacctacaaccagaagttcgaggacagattcaccatcagccgggacaacagcaagaacaccctgtacctccagatgaactccctgagagccgaggacaccgccgtgtactattgtgccagaggctggaacttcgactactggggccagggaacactggtcaccgttagctctacgcgtaccacgacgccagcgccgcgaccaccaacaccggcgcccaccatcgcgtcgcagcccctgtccctgcgcccagaggcgtgccggccagcggcggggggcgcagtgcacacgagggggctggacttcgcctgtgacatctacatctgggcgcccttggccgggacttgtggggtccttctcctgtcactggttatcaccctttactgcaaacggggcagaaagaaactcctgtatatattcaaacaaccatttatgagaccagtacaaactactcaagaggaagatggctgtagctgccgatttccagaagaagaagaaggaggatgtgaactgagagtgaagttcagcaggagcgcagacgcccccgcgtaccagcagggccagaaccagctctataacgagctgaatctaggacgaagagaggagtacgatgttttggacaagagacgtggccgggaccctgagatggggggaaagccgagaaggaagaaccctcaggaaggcctgtacaatgaactgcagaaagataagatggcggaggcctacagtgagattgggatgaaaggcgagcgccggaggggcaaggggcacgatggcctttaccagggtctcagtacagccaccaaggacacctacgacgcccttcacatgcaggccctgccccctcgctaa

SEQ ID NO: 8434 - DNA, 1491 bp, synthetic construct; identical to SEQ ID NO: 8418
  source 1..1491: mol_type = other DNA

SEQ ID NO: 8435 - DNA, 1491 bp, synthetic construct
  source 1..1491: mol_type = other DNA
atggccttaccagtgaccgccttgctcctgccgctggccttgctgctccacgccgccaggccggcccgcagcgaggaccgctacaagggaggcagcggagacatccagatgacacagagccctagcagcctgtctgccagcgtgggagacagagtgaccatcacatgcaaggccagccaggatgtgggcacagccgtggattggtatcagcagaagcctggcaaggcccctaagctgctgatctactgggccagcacaagacacacaggcgtgcccagcagattttctggcagcggctctggcaccgacttcaccctgacaatatccagcctccagcctgaggacttcgccacctactactgccagcagtacaacagctaccctctgaccttcggccagggcaccaaggtggaaatcaaaagaggcggaggcggatctggcggcggaggtagcggtggcggaggatctgaagtgcagctggttgaatcaggtggcggcctggttcaacctggcggatctctgagactgagctgtgccgccagcggctacacctttaccgagtacacaatccactgggtccgacaggcccctggcaaaggacttgagtgggtcgccaacatcaaccccaacaatggcggcaccacctacaaccagaagttcgaggacagattcaccatcagccgggacaacagcaagaacaccctgtacctccagatgaactccctgagagccgaggacaccgccgtgtactattgtgccagaggctggaacttcgactactggggccagggaacactggtcaccgttagctctacgcgtaccacgacgccagcgccgcgaccaccaacaccggcgcccaccatcgcgtcgcagcccctgtccctgcgcccagaggcgtgccggccagcggcggggggcgcagtgcacacgagggggctggacttcgcctgtgacatctacatctgggcgcccttggccgggacttgtggggtccttctcctgtcactggttatcaccctttactgcaaacggggcagaaagaaactcctgtatatattcaaacaaccatttatgagaccagtacaaactactcaagaggaagatggctgtagctgccgatttccagaagaagaagaaggaggatgtgaactgagagtgaagttcagcaggagcgcagacgcccccgcgtaccagcagggccagaaccagctctataacgagctgaatctaggacgaagagaggagtacgatgttttggacaagagacgtggccgggaccctgagatggggggaaagccgagaaggaagaaccctcaggaaggcctgtacaatgaactgcagaaagataagatggcggaggcctacagtgagattgggatgaaaggcgagcgccggaggggcaaggggcacgatggcctttaccagggtctcagtacagccaccaaggacacctacgacgcccttcacatgcaggccctgccccctcgctaa

SEQ ID NO: 8436 - DNA, 1491 bp, synthetic construct
  source 1..1491: mol_type = other DNA
atggccttaccagtgaccgccttgctcctgccgctggccttgctgctccacgccgccaggccggcccgcagcgaggaccgctacagcggaggcagcggagacatccagatgacacagagccctagcagcctgtctgccagcgtgggagacagagtgaccatcacatgcaaggccagccaggatgtgggcacagccgtggattggtatcagcagaagcctggcaaggcccctaagctgctgatctactgggccagcacaagacacacaggcgtgcccagcagattttctggcagcggctctggcaccgacttcaccctgacaatatccagcctccagcctgaggacttcgccacctactactgccagcagtacaacagctaccctctgaccttcggccagggcaccaaggtggaaatcaaaagaggcggaggcggatctggcggcggaggtagcggtggcggaggatctgaagtgcagctggttgaatcaggtggcggcctggttcaacctggcggatctctgagactgagctgtgccgccagcggctacacctttaccgagtacacaatccactgggtccgacaggcccctggcaaaggacttgagtgggtcgccaacatcaaccccaacaatggcggcaccacctacaaccagaagttcgaggacagattcaccatcagccgggacaacagcaagaacaccctgtacctccagatgaactccctgagagccgaggacaccgccgtgtactattgtgccagaggctggaacttcgactactggggccagggaacactggtcaccgttagctctacgcgtaccacgacgccagcgccgcgaccaccaacaccggcgcccaccatcgcgtcgcagcccctgtccctgcgcccagaggcgtgccggccagcggcggggggcgcagtgcacacgagggggctggacttcgcctgtgacatctacatctgggcgcccttggccgggacttgtggggtccttctcctgtcactggttatcaccctttactgcaaacggggcagaaagaaactcctgtatatattcaaacaaccatttatgagaccagtacaaactactcaagaggaagatggctgtagctgccgatttccagaagaagaagaaggaggatgtgaactgagagtgaagttcagcaggagcgcagacgcccccgcgtaccagcagggccagaaccagctctataacgagctgaatctaggacgaagagaggagtacgatgttttggacaagagacgtggccgggaccctgagatggggggaaagccgagaaggaagaaccctcaggaaggcctgtacaatgaactgcagaaagataagatggcggaggcctacagtgagattgggatgaaaggcgagcgccggaggggcaaggggcacgatggcctttaccagggtctcagtacagccaccaaggacacctacgacgcccttcacatgcaggccctgccccctcgctaa

SEQ ID NO: 8437 - DNA, 1491 bp, synthetic construct
  source 1..1491: mol_type = other DNA
atggccttaccagtgaccgccttgctcctgccgctggccttgctgctccacgccgccaggccggcccgcagcgaggaccgctacttcggaggcagcggagacatccagatgacacagagccctagcagcctgtctgccagcgtgggagacagagtgaccatcacatgcaaggccagccaggatgtgggcacagccgtggattggtatcagcagaagcctggcaaggcccctaagctgctgatctactgggccagcacaagacacacaggcgtgcccagcagattttctggcagcggctctggcaccgacttcaccctgacaatatccagcctccagcctgaggacttcgccacctactactgccagcagtacaacagctaccctctgaccttcggccagggcaccaaggtggaaatcaaaagaggcggaggcggatctggcggcggaggtagcggtggcggaggatctgaagtgcagctggttgaatcaggtggcggcctggttcaacctggcggatctctgagactgagctgtgccgccagcggctacacctttaccgagtacacaatccactgggtccgacaggcccctggcaaaggacttgagtgggtcgccaacatcaaccccaacaatggcggcaccacctacaaccagaagttcgaggacagattcaccatcagccgggacaacagcaagaacaccctgtacctccagatgaactccctgagagccgaggacaccgccgtgtactattgtgccagaggctggaacttcgactactggggccagggaacactggtcaccgttagctctacgcgtaccacgacgccagcgccgcgaccaccaacaccggcgcccaccatcgcgtcgcagcccctgtccctgcgcccagaggcgtgccggccagcggcggggggcgcagtgcacacgagggggctggacttcgcctgtgacatctacatctgggcgcccttggccgggacttgtggggtccttctcctgtcactggttatcaccctttactgcaaacggggcagaaagaaactcctgtatatattcaaacaaccatttatgagaccagtacaaactactcaagaggaagatggctgtagctgccgatttccagaagaagaagaaggaggatgtgaactgagagtgaagttcagcaggagcgcagacgcccccgcgtaccagcagggccagaaccagctctataacgagctgaatctaggacgaagagaggagtacgatgttttggacaagagacgtggccgggaccctgagatggggggaaagccgagaaggaagaaccctcaggaaggcctgtacaatgaactgcagaaagataagatggcggaggcctacagtgagattgggatgaaaggcgagcgccggaggggcaaggggcacgatggcctttaccagggtctcagtacagccaccaaggacacctacgacgcccttcacatgcaggccctgccccctcgctaa

SEQ ID NO: 8438 - DNA, 1491 bp, synthetic construct
  source 1..1491: mol_type = other DNA
atggccttaccagtgaccgccttgctcctgccgctggccttgctgctccacgccgccaggccggcccgcagcgaggaccgctacatcggaggcagcggagacatccagatgacacagagccctagcagcctgtctgccagcgtgggagacagagtgaccatcacatgcaaggccagccaggatgtgggcacagccgtggattggtatcagcagaagcctggcaaggcccctaagctgctgatctactgggccagcacaagacacacaggcgtgcccagcagattttctggcagcggctctggcaccgacttcaccctgacaatatccagcctccagcctgaggacttcgccacctactactgccagcagtacaacagctaccctctgaccttcggccagggcaccaaggtggaaatcaaaagaggcggaggcggatctggcggcggaggtagcggtggcggaggatctgaagtgcagctggttgaatcaggtggcggcctggttcaacctggcggatctctgagactgagctgtgccgccagcggctacacctttaccgagtacacaatccactgggtccgacaggcccctggcaaaggacttgagtgggtcgccaacatcaaccccaacaatggcggcaccacctacaaccagaagttcgaggacagattcaccatcagccgggacaacagcaagaacaccctgtacctccagatgaactccctgagagccgaggacaccgccgtgtactattgtgccagaggctggaacttcgactactggggccagggaacactggtcaccgttagctctacgcgtaccacgacgccagcgccgcgaccaccaacaccggcgcccaccatcgcgtcgcagcccctgtccctgcgcccagaggcgtgccggccagcggcggggggcgcagtgcacacgagggggctggacttcgcctgtgacatctacatctgggcgcccttggccgggacttgtggggtccttctcctgtcactggttatcaccctttactgcaaacggggcagaaagaaactcctgtatatattcaaacaaccatttatgagaccagtacaaactactcaagaggaagatggctgtagctgccgatttccagaagaagaagaaggaggatgtgaactgagagtgaagttcagcaggagcgcagacgcccccgcgtaccagcagggccagaaccagctctataacgagctgaatctaggacgaagagaggagtacgatgttttggacaagagacgtggccgggaccctgagatggggggaaagccgagaaggaagaaccctcaggaaggcctgtacaatgaactgcagaaagataagatggcggaggcctacagtgagattgggatgaaaggcgagcgccggaggggcaaggggcacgatggcctttaccagggtctcagtacagccaccaaggacacctacgacgcccttcacatgcaggccctgccccctcgctaa

SEQ ID NO: 8439 - DNA, 1491 bp, synthetic construct
  source 1..1491: mol_type = other DNA
atggccttaccagtgaccgccttgctcctgccgctggccttgctgctccacgccgccaggccggcccgcagcgaggaccgctacaacggaggcagcggagacatccagatgacacagagccctagcagcctgtctgccagcgtgggagacagagtgaccatcacatgcaaggccagccaggatgtgggcacagccgtggattggtatcagcagaagcctggcaaggcccctaagctgctgatctactgggccagcacaagacacacaggcgtgcccagcagattttctggcagcggctctggcaccgacttcaccctgacaatatccagcctccagcctgaggacttcgccacctactactgccagcagtacaacagctaccctctgaccttcggccagggcaccaaggtggaaatcaaaagaggcggaggcggatctggcggcggaggtagcggtggcggaggatctgaagtgcagctggttgaatcaggtggcggcctggttcaacctggcggatctctgagactgagctgtgccgccagcggctacacctttaccgagtacacaatccactgggtccgacaggcccctggcaaaggacttgagtgggtcgccaacatcaaccccaacaatggcggcaccacctacaaccagaagttcgaggacagattcaccatcagccgggacaacagcaagaacaccctgtacctccagatgaactccctgagagccgaggacaccgccgtgtactattgtgccagaggctggaacttcgactactggggccagggaacactggtcaccgttagctctacgcgtaccacgacgccagcgccgcgaccaccaacaccggcgcccaccatcgcgtcgcagcccctgtccctgcgcccagaggcgtgccggccagcggcggggggcgcagtgcacacgagggggctggacttcgcctgtgacatctacatctgggcgcccttggccgggacttgtggggtccttctcctgtcactggttatcaccctttactgcaaacggggcagaaagaaactcctgtatatattcaaacaaccatttatgagaccagtacaaactactcaagaggaagatggctgtagctgccgatttccagaagaagaagaaggaggatgtgaactgagagtgaagttcagcaggagcgcagacgcccccgcgtaccagcagggccagaaccagctctataacgagctgaatctaggacgaagagaggagtacgatgttttggacaagagacgtggccgggaccctgagatggggggaaagccgagaaggaagaaccctcaggaaggcctgtacaatgaactgcagaaagataagatggcggaggcctacagtgagattgggatgaaaggcgagcgccggaggggcaaggggcacgatggcctttaccagggtctcagtacagccaccaaggacacctacgacgcccttcacatgcaggccctgccccctcgctaa

SEQ ID NO: 8440 - DNA, 1491 bp, synthetic construct
  source 1..1491: mol_type = other DNA
atggccttaccagtgaccgccttgctcctgccgctggccttgctgctccacgccgccaggccggcccgcagcgaggaccgctacaccggaggcagcggagacatccagatgacacagagccctagcagcctgtctgccagcgtgggagacagagtgaccatcacatgcaaggccagccaggatgtgggcacagccgtggattggtatcagcagaagcctggcaaggcccctaagctgctgatctactgggccagcacaagacacacaggcgtgcccagcagattttctggcagcggctctggcaccgacttcaccctgacaatatccagcctccagcctgaggacttcgccacctactactgccagcagtacaacagctaccctctgaccttcggccagggcaccaaggtggaaatcaaaagaggcggaggcggatctggcggcggaggtagcggtggcggaggatctgaagtgcagctggttgaatcaggtggcggcctggttcaacctggcggatctctgagactgagctgtgccgccagcggctacacctttaccgagtacacaatccactgggtccgacaggcccctggcaaaggacttgagtgggtcgccaacatcaaccccaacaatggcggcaccacctacaaccagaagttcgaggacagattcaccatcagccgggacaacagcaagaacaccctgtacctccagatgaactccctgagagccgaggacaccgccgtgtactattgtgccagaggctggaacttcgactactggggccagggaacactggtcaccgttagctctacgcgtaccacgacgccagcgccgcgaccaccaacaccggcgcccaccatcgcgtcgcagcccctgtccctgcgcccagaggcgtgccggccagcggcggggggcgcagtgcacacgagggggctggacttcgcctgtgacatctacatctgggcgcccttggccgggacttgtggggtccttctcctgtcactggttatcaccctttactgcaaacggggcagaaagaaactcctgtatatattcaaacaaccatttatgagaccagtacaaactactcaagaggaagatggctgtagctgccgatttccagaagaagaagaaggaggatgtgaactgagagtgaagttcagcaggagcgcagacgcccccgcgtaccagcagggccagaaccagctctataacgagctgaatctaggacgaagagaggagtacgatgttttggacaagagacgtggccgggaccctgagatggggggaaagccgagaaggaagaaccctcaggaaggcctgtacaatgaactgcagaaagataagatggcggaggcctacagtgagattgggatgaaaggcgagcgccggaggggcaaggggcacgatggcctttaccagggtctcagtacagccaccaaggacacctacgacgcccttcacatgcaggccctgccccctcgctaa

SEQ ID NO: 8441 - DNA, 1491 bp, synthetic construct
  source 1..1491: mol_type = other DNA
atggccttaccagtgaccgccttgctcctgccgctggccttgctgctccacgccgccaggccggcccgcagcgaggaccgctacgccggaggcagcggagacatccagatgacacagagccctagcagcctgtctgccagcgtgggagacagagtgaccatcacatgcaaggccagccaggatgtgggcacagccgtggattggtatcagcagaagcctggcaaggcccctaagctgctgatctactgggccagcacaagacacacaggcgtgcccagcagattttctggcagcggctctggcaccgacttcaccctgacaatatccagcctccagcctgaggacttcgccacctactactgccagcagtacaacagctaccctctgaccttcggccagggcaccaaggtggaaatcaaaagaggcggaggcggatctggcggcggaggtagcggtggcggaggatctgaagtgcagctggttgaatcaggtggcggcctggttcaacctggcggatctctgagactgagctgtgccgccagcggctacacctttaccgagtacacaatccactgggtccgacaggcccctggcaaaggacttgagtgggtcgccaacatcaaccccaacaatggcggcaccacctacaaccagaagttcgaggacagattcaccatcagccgggacaacagcaagaacaccctgtacctccagatgaactccctgagagccgaggacaccgccgtgtactattgtgccagaggctggaacttcgactactggggccagggaacactggtcaccgttagctctacgcgtaccacgacgccagcgccgcgaccaccaacaccggcgcccaccatcgcgtcgcagcccctgtccctgcgcccagaggcgtgccggccagcggcggggggcgcagtgcacacgagggggctggacttcgcctgtgacatctacatctgggcgcccttggccgggacttgtggggtccttctcctgtcactggttatcaccctttactgcaaacggggcagaaagaaactcctgtatatattcaaacaaccatttatgagaccagtacaaactactcaagaggaagatggctgtagctgccgatttccagaagaagaagaaggaggatgtgaactgagagtgaagttcagcaggagcgcagacgcccccgcgtaccagcagggccagaaccagctctataacgagctgaatctaggacgaagagaggagtacgatgttttggacaagagacgtggccgggaccctgagatggggggaaagccgagaaggaagaaccctcaggaaggcctgtacaatgaactgcagaaagataagatggcggaggcctacagtgagattgggatgaaaggcgagcgccggaggggcaaggggcacgatggcctttaccagggtctcagtacagccaccaaggacacctacgacgcccttcacatgcaggccctgccccctcgctaa

SEQ ID NO: 8442 - DNA, 1491 bp, synthetic construct
  source 1..1491: mol_type = other DNA
atggccttaccagtgaccgccttgctcctgccgctggccttgctgctccacgccgccaggccggcccgcagcgaggaccgctactacggaggcagcggagacatccagatgacacagagccctagcagcctgtctgccagcgtgggagacagagtgaccatcacatgcaaggccagccaggatgtgggcacagccgtggattggtatcagcagaagcctggcaaggcccctaagctgctgatctactgggccagcacaagacacacaggcgtgcccagcagattttctggcagcggctctggcaccgacttcaccctgacaatatccagcctccagcctgaggacttcgccacctactactgccagcagtacaacagctaccctctgaccttcggccagggcaccaaggtggaaatcaaaagaggcggaggcggatctggcggcggaggtagcggtggcggaggatctgaagtgcagctggttgaatcaggtggcggcctggttcaacctggcggatctctgagactgagctgtgccgccagcggctacacctttaccgagtacacaatccactgggtccgacaggcccctggcaaaggacttgagtgggtcgccaacatcaaccccaacaatggcggcaccacctacaaccagaagttcgaggacagattcaccatcagccgggacaacagcaagaacaccctgtacctccagatgaactccctgagagccgaggacaccgccgtgtactattgtgccagaggctggaacttcgactactggggccagggaacactggtcaccgttagctctacgcgtaccacgacgccagcgccgcgaccaccaacaccggcgcccaccatcgcgtcgcagcccctgtccctgcgcccagaggcgtgccggccagcggcggggggcgcagtgcacacgagggggctggacttcgcctgtgacatctacatctgggcgcccttggccgggacttgtggggtccttctcctgtcactggttatcaccctttactgcaaacggggcagaaagaaactcctgtatatattcaaacaaccatttatgagaccagtacaaactactcaagaggaagatggctgtagctgccgatttccagaagaagaagaaggaggatgtgaactgagagtgaagttcagcaggagcgcagacgcccccgcgtaccagcagggccagaaccagctctataacgagctgaatctaggacgaagagaggagtacgatgttttggacaagagacgtggccgggaccctgagatggggggaaagccgagaaggaagaaccctcaggaaggcctgtacaatgaactgcagaaagataagatggcggaggcctacagtgagattgggatgaaaggcgagcgccggaggggcaaggggcacgatggcctttaccagggtctcagtacagccaccaaggacacctacgacgcccttcacatgcaggccctgccccctcgctaa

SEQ ID NO: 8443 - DNA, 1491 bp, synthetic construct
  source 1..1491: mol_type = other DNA
atggccttaccagtgaccgccttgctcctgccgctggccttgctgctccacgccgccaggccggcccgcagcgaggaccgctaccccggaggcagcggagacatccagatgacacagagccctagcagcctgtctgccagcgtgggagacagagtgaccatcacatgcaaggccagccaggatgtgggcacagccgtggattggtatcagcagaagcctggcaaggcccctaagctgctgatctactgggccagcacaagacacacaggcgtgcccagcagattttctggcagcggctctggcaccgacttcaccctgacaatatccagcctccagcctgaggacttcgccacctactactgccagcagtacaacagctaccctctgaccttcggccagggcaccaaggtggaaatcaaaagaggcggaggcggatctggcggcggaggtagcggtggcggaggatctgaagtgcagctggttgaatcaggtggcggcctggttcaacctggcggatctctgagactgagctgtgccgccagcggctacacctttaccgagtacacaatccactgggtccgacaggcccctggcaaaggacttgagtgggtcgccaacatcaaccccaacaatggcggcaccacctacaaccagaagttcgaggacagattcaccatcagccgggacaacagcaagaacaccctgtacctccagatgaactccctgagagccgaggacaccgccgtgtactattgtgccagaggctggaacttcgactactggggccagggaacactggtcaccgttagctctacgcgtaccacgacgccagcgccgcgaccaccaacaccggcgcccaccatcgcgtcgcagcccctgtccctgcgcccagaggcgtgccggccagcggcggggggcgcagtgcacacgagggggctggacttcgcctgtgacatctacatctgggcgcccttggccgggacttgtggggtccttctcctgtcactggttatcaccctttactgcaaacggggcagaaagaaactcctgtatatattcaaacaaccatttatgagaccagtacaaactactcaagaggaagatggctgtagctgccgatttccagaagaagaagaaggaggatgtgaactgagagtgaagttcagcaggagcgcagacgcccccgcgtaccagcagggccagaaccagctctataacgagctgaatctaggacgaagagaggagtacgatgttttggacaagagacgtggccgggaccctgagatggggggaaagccgagaaggaagaaccctcaggaaggcctgtacaatgaactgcagaaagataagatggcggaggcctacagtgagattgggatgaaaggcgagcgccggaggggcaaggggcacgatggcctttaccagggtctcagtacagccaccaaggacacctacgacgcccttcacatgcaggccctgccccctcgctaa

SEQ ID NO: 8444 - DNA, 1491 bp, synthetic construct
  source 1..1491: mol_type = other DNA
atggccttaccagtgaccgccttgctcctgccgctggccttgctgctccacgccgccaggccggcccgcagcgaggaccgctacgacggaggcagcggagacatccagatgacacagagccctagcagcctgtctgccagcgtgggagacagagtgaccatcacatgcaaggccagccaggatgtgggcacagccgtggattggtatcagcagaagcctggcaaggcccctaagctgctgatctactgggccagcacaagacacacaggcgtgcccagcagattttctggcagcggctctggcaccgacttcaccctgacaatatccagcctccagcctgaggacttcgccacctactactgccagcagtacaacagctaccctctgaccttcggccagggcaccaaggtggaaatcaaaagaggcggaggcggatctggcggcggaggtagcggtggcggaggatctgaagtgcagctggttgaatcaggtggcggcctggttcaacctggcggatctctgagactgagctgtgccgccagcggctacacctttaccgagtacacaatccactgggtccgacaggcccctggcaaaggacttgagtgggtcgccaacatcaaccccaacaatggcggcaccacctacaaccagaagttcgaggacagattcaccatcagccgggacaacagcaagaacaccctgtacctccagatgaactccctgagagccgaggacaccgccgtgtactattgtgccagaggctggaacttcgactactggggccagggaacactggtcaccgttagctctacgcgtaccacgacgccagcgccgcgaccaccaacaccggcgcccaccatcgcgtcgcagcccctgtccctgcgcccagaggcgtgccggccagcggcggggggcgcagtgcacacgagggggctggacttcgcctgtgacatctacatctgggcgcccttggccgggacttgtggggtccttctcctgtcactggttatcaccctttactgcaaacggggcagaaagaaactcctgtatatattcaaacaaccatttatgagaccagtacaaactactcaagaggaagatggctgtagctgccgatttccagaagaagaagaaggaggatgtgaactgagagtgaagttcagcaggagcgcagacgcccccgcgtaccagcagggccagaaccagctctataacgagctgaatctaggacgaagagaggagtacgatgttttggacaagagacgtggccgggaccctgagatggggggaaagccgagaaggaagaaccctcaggaaggcctgtacaatgaactgcagaaagataagatggcggaggcctacagtgagattgggatgaaaggcgagcgccggaggggcaaggggcacgatggcctttaccagggtctcagtacagccaccaaggacacctacgacgcccttcacatgcaggccctgccccctcgctaa

SEQ ID NO: 8445 - DNA, 1491 bp, synthetic construct
  source 1..1491: mol_type = other DNA
atggccttaccagtgaccgccttgctcctgccgctggccttgctgctccacgccgccaggccggcccgcagcgaggaccactaccgcggaggcagcggagacatccagatgacacagagccctagcagcctgtctgccagcgtgggagacagagtgaccatcacatgcaaggccagccaggatgtgggcacagccgtggattggtatcagcagaagcctggcaaggcccctaagctgctgatctactgggccagcacaagacacacaggcgtgcccagcagattttctggcagcggctctggcaccgacttcaccctgacaatatccagcctccagcctgaggacttcgccacctactactgccagcagtacaacagctaccctctgaccttcggccagggcaccaaggtggaaatcaaaagaggcggaggcggatctggcggcggaggtagcggtggcggaggatctgaagtgcagctggttgaatcaggtggcggcctggttcaacctggcggatctctgagactgagctgtgccgccagcggctacacctttaccgagtacacaatccactgggtccgacaggcccctggcaaaggacttgagtgggtcgccaacatcaaccccaacaatggcggcaccacctacaaccagaagttcgaggacagattcaccatcagccgggacaacagcaagaacaccctgtacctccagatgaactccctgagagccgaggacaccgccgtgtactattgtgccagaggctggaacttcgactactggggccagggaacactggtcaccgttagctctacgcgtaccacgacgccagcgccgcgaccaccaacaccggcgcccaccatcgcgtcgcagcccctgtccctgcgcccagaggcgtgccggccagcggcggggggcgcagtgcacacgagggggctggacttcgcctgtgacatctacatctgggcgcccttggccgggacttgtggggtccttctcctgtcactggttatcaccctttactgcaaacggggcagaaagaaactcctgtatatattcaaacaaccatttatgagaccagtacaaactactcaagaggaagatggctgtagctgccgatttccagaagaagaagaaggaggatgtgaactgagagtgaagttcagcaggagcgcagacgcccccgcgtaccagcagggccagaaccagctctataacgagctgaatctaggacgaagagaggagtacgatgttttggacaagagacgtggccgggaccctgagatggggggaaagccgagaaggaagaaccctcaggaaggcctgtacaatgaactgcagaaagataagatggcggaggcctacagtgagattgggatgaaaggcgagcgccggaggggcaaggggcacgatggcctttaccagggtctcagtacagccaccaaggacacctacgacgcccttcacatgcaggccctgccccctcgctaa

SEQ ID NO: 8446 - DNA, 1491 bp, synthetic construct
  source 1..1491: mol_type = other DNA
atggccttaccagtgaccgccttgctcctgccgctggccttgctgctccacgccgccaggccggcccgcagcgagagccgctaccgcggaggcagcggagacatccagatgacacagagccctagcagcctgtctgccagcgtgggagacagagtgaccatcacatgcaaggccagccaggatgtgggcacagccgtggattggtatcagcagaagcctggcaaggcccctaagctgctgatctactgggccagcacaagacacacaggcgtgcccagcagattttctggcagcggctctggcaccgacttcaccctgacaatatccagcctccagcctgaggacttcgccacctactactgccagcagtacaacagctaccctctgaccttcggccagggcaccaaggtggaaatcaaaagaggcggaggcggatctggcggcggaggtagcggtggcggaggatctgaagtgcagctggttgaatcaggtggcggcctggttcaacctggcggatctctgagactgagctgtgccgccagcggctacacctttaccgagtacacaatccactgggtccgacaggcccctggcaaaggacttgagtgggtcgccaacatcaaccccaacaatggcggcaccacctacaaccagaagttcgaggacagattcaccatcagccgggacaacagcaagaacaccctgtacctccagatgaactccctgagagccgaggacaccgccgtgtactattgtgccagaggctggaacttcgactactggggccagggaacactggtcaccgttagctctacgcgtaccacgacgccagcgccgcgaccaccaacaccggcgcccaccatcgcgtcgcagcccctgtccctgcgcccagaggcgtgccggccagcggcggggggcgcagtgcacacgagggggctggacttcgcctgtgacatctacatctgggcgcccttggccgggacttgtggggtccttctcctgtcactggttatcaccctttactgcaaacggggcagaaagaaactcctgtatatattcaaacaaccatttatgagaccagtacaaactactcaagaggaagatggctgtagctgccgatttccagaagaagaagaaggaggatgtgaactgagagtgaagttcagcaggagcgcagacgcccccgcgtaccagcagggccagaaccagctctataacgagctgaatctaggacgaagagaggagtacgatgttttggacaagagacgtggccgggaccctgagatggggggaaagccgagaaggaagaaccctcaggaaggcctgtacaatgaactgcagaaagataagatggcggaggcctacagtgagattgggatgaaaggcgagcgccggaggggcaaggggcacgatggcctttaccagggtctcagtacagccaccaaggacacctacgacgcccttcacatgcaggccctgccccctcgctaa

SEQ ID NO: 8447 - DNA, 1491 bp, synthetic construct
  source 1..1491: mol_type = other DNA
atggccttaccagtgaccgccttgctcctgccgctggccttgctgctccacgccgccaggccggcccgcagcgagaaccgctaccgcggaggcagcggagacatccagatgacacagagccctagcagcctgtctgccagcgtgggagacagagtgaccatcacatgcaaggccagccaggatgtgggcacagccgtggattggtatcagcagaagcctggcaaggcccctaagctgctgatctactgggccagcacaagacacacaggcgtgcccagcagattttctggcagcggctctggcaccgacttcaccctgacaatatccagcctccagcctgaggacttcgccacctactactgccagcagtacaacagctaccctctgaccttcggccagggcaccaaggtggaaatcaaaagaggcggaggcggatctggcggcggaggtagcggtggcggaggatctgaagtgcagctggttgaatcaggtggcggcctggttcaacctggcggatctctgagactgagctgtgccgccagcggctacacctttaccgagtacacaatccactgggtccgacaggcccctggcaaaggacttgagtgggtcgccaacatcaaccccaacaatggcggcaccacctacaaccagaagttcgaggacagattcaccatcagccgggacaacagcaagaacaccctgtacctccagatgaactccctgagagccgaggacaccgccgtgtactattgtgccagaggctggaacttcgactactggggccagggaacactggtcaccgttagctctacgcgtaccacgacgccagcgccgcgaccaccaacaccggcgcccaccatcgcgtcgcagcccctgtccctgcgcccagaggcgtgccggccagcggcggggggcgcagtgcacacgagggggctggacttcgcctgtgacatctacatctgggcgcccttggccgggacttgtggggtccttctcctgtcactggttatcaccctttactgcaaacggggcagaaagaaactcctgtatatattcaaacaaccatttatgagaccagtacaaactactcaagaggaagatggctgtagctgccgatttccagaagaagaagaaggaggatgtgaactgagagtgaagttcagcaggagcgcagacgcccccgcgtaccagcagggccagaaccagctctataacgagctgaatctaggacgaagagaggagtacgatgttttggacaagagacgtggccgggaccctgagatggggggaaagccgagaaggaagaaccctcaggaaggcctgtacaatgaactgcagaaagataagatggcggaggcctacagtgagattgggatgaaaggcgagcgccggaggggcaaggggcacgatggcctttaccagggtctcagtacagccaccaaggacacctacgacgcccttcacatgcaggccctgccccctcgctaa

SEQ ID NO: 8448 - DNA, 1491 bp, synthetic construct
  source 1..1491: mol_type = other DNA
atggccttaccagtgaccgccttgctcctgccgctggccttgctgctccacgccgccaggccggcccgcagcgagggccgctaccgcggaggcagcggagacatccagatgacacagagccctagcagcctgtctgccagcgtgggagacagagtgaccatcacatgcaaggccagccaggatgtgggcacagccgtggattggtatcagcagaagcctggcaaggcccctaagctgctgatctactgggccagcacaagacacacaggcgtgcccagcagattttctggcagcggctctggcaccgacttcaccctgacaatatccagcctccagcctgaggacttcgccacctactactgccagcagtacaacagctaccctctgaccttcggccagggcaccaaggtggaaatcaaaagaggcggaggcggatctggcggcggaggtagcggtggcggaggatctgaagtgcagctggttgaatcaggtggcggcctggttcaacctggcggatctctgagactgagctgtgccgccagcggctacacctttaccgagtacacaatccactgggtccgacaggcccctggcaaaggacttgagtgggtcgccaacatcaaccccaacaatggcggcaccacctacaaccagaagttcgaggacagattcaccatcagccgggacaacagcaagaacaccctgtacctccagatgaactccctgagagccgaggacaccgccgtgtactattgtgccagaggctggaacttcgactactggggccagggaacactggtcaccgttagctctacgcgtaccacgacgccagcgccgcgaccaccaacaccggcgcccaccatcgcgtcgcagcccctgtccctgcgcccagaggcgtgccggccagcggcggggggcgcagtgcacacgagggggctggacttcgcctgtgacatctacatctgggcgcccttggccgggacttgtggggtccttctcctgtcactggttatcaccctttactgcaaacggggcagaaagaaactcctgtatatattcaaacaaccatttatgagaccagtacaaactactcaagaggaagatggctgtagctgccgatttccagaagaagaagaaggaggatgtgaactgagagtgaagttcagcaggagcgcagacgcccccgcgtaccagcagggccagaaccagctctataacgagctgaatctaggacgaagagaggagtacgatgttttggacaagagacgtggccgggaccctgagatggggggaaagccgagaaggaagaaccctcaggaaggcctgtacaatgaactgcagaaagataagatggcggaggcctacagtgagattgggatgaaaggcgagcgccggaggggcaaggggcacgatggcctttaccagggtctcagtacagccaccaaggacacctacgacgcccttcacatgcaggccctgccccctcgctaa

SEQ ID NO: 8449 - DNA, 1491 bp, synthetic construct
  source 1..1491: mol_type = other DNA
atggccttaccagtgaccgccttgctcctgccgctggccttgctgctccacgccgccaggccggcccgcagcgaggcccgctaccgcggaggcagcggagacatccagatgacacagagccctagcagcctgtctgccagcgtgggagacagagtgaccatcacatgcaaggccagccaggatgtgggcacagccgtggattggtatcagcagaagcctggcaaggcccctaagctgctgatctactgggccagcacaagacacacaggcgtgcccagcagattttctggcagcggctctggcaccgacttcaccctgacaatatccagcctccagcctgaggacttcgccacctactactgccagcagtacaacagctaccctctgaccttcggccagggcaccaaggtggaaatcaaaagaggcggaggcggatctggcggcggaggtagcggtggcggaggatctgaagtgcagctggttgaatcaggtggcggcctggttcaacctggcggatctctgagactgagctgtgccgccagcggctacacctttaccgagtacacaatccactgggtccgacaggcccctggcaaaggacttgagtgggtcgccaacatcaaccccaacaatggcggcaccacctacaaccagaagttcgaggacagattcaccatcagccgggacaacagcaagaacaccctgtacctccagatgaactccctgagagccgaggacaccgccgtgtactattgtgccagaggctggaacttcgactactggggccagggaacactggtcaccgttagctctacgcgtaccacgacgccagcgccgcgaccaccaacaccggcgcccaccatcgcgtcgcagcccctgtccctgcgcccagaggcgtgccggccagcggcggggggcgcagtgcacacgagggggctggacttcgcctgtgacatctacatctgggcgcccttggccgggacttgtggggtccttctcctgtcactggttatcaccctttactgcaaacggggcagaaagaaactcctgtatatattcaaacaaccatttatgagaccagtacaaactactcaagaggaagatggctgtagctgccgatttccagaagaagaagaaggaggatgtgaactgagagtgaagttcagcaggagcgcagacgcccccgcgtaccagcagggccagaaccagctctataacgagctgaatctaggacgaagagaggagtacgatgttttggacaagagacgtggccgggaccctgagatggggggaaagccgagaaggaagaaccctcaggaaggcctgtacaatgaactgcagaaagataagatggcggaggcctacagtgagattgggatgaaaggcgagcgccggaggggcaaggggcacgatggcctttaccagggtctcagtacagccaccaaggacacctacgacgcccttcacatgcaggccctgccccctcgctaa

SEQ ID NO: 8450 - DNA, 1491 bp, synthetic construct
  source 1..1491: mol_type = other DNA
atggccttaccagtgaccgccttgctcctgccgctggccttgctgctccacgccgccaggccggcccgcagcgagcagcgctaccgcggaggcagcggagacatccagatgacacagagccctagcagcctgtctgccagcgtgggagacagagtgaccatcacatgcaaggccagccaggatgtgggcacagccgtggattggtatcagcagaagcctggcaaggcccctaagctgctgatctactgggccagcacaagacacacaggcgtgcccagcagattttctggcagcggctctggcaccgacttcaccctgacaatatccagcctccagcctgaggacttcgccacctactactgccagcagtacaacagctaccctctgaccttcggccagggcaccaaggtggaaatcaaaagaggcggaggcggatctggcggcggaggtagcggtggcggaggatctgaagtgcagctggttgaatcaggtggcggcctggttcaacctggcggatctctgagactgagctgtgccgccagcggctacacctttaccgagtacacaatccactgggtccgacaggcccctggcaaaggacttgagtgggtcgccaacatcaaccccaacaatggcggcaccacctacaaccagaagttcgaggacagattcaccatcagccgggacaacagcaagaacaccctgtacctccagatgaactccctgagagccgaggacaccgccgtgtactattgtgccagaggctggaacttcgactactggggccagggaacactggtcaccgttagctctacgcgtaccacgacgccagcgccgcgaccaccaacaccggcgcccaccatcgcgtcgcagcccctgtccctgcgcccagaggcgtgccggccagcggcggggggcgcagtgcacacgagggggctggacttcgcctgtgacatctacatctgggcgcccttggccgggacttgtggggtccttctcctgtcactggttatcaccctttactgcaaacggggcagaaagaaactcctgtatatattcaaacaaccatttatgagaccagtacaaactactcaagaggaagatggctgtagctgccgatttccagaagaagaagaaggaggatgtgaactgagagtgaagttcagcaggagcgcagacgcccccgcgtaccagcagggccagaaccagctctataacgagctgaatctaggacgaagagaggagtacgatgttttggacaagagacgtggccgggaccctgagatggggggaaagccgagaaggaagaaccctcaggaaggcctgtacaatgaactgcagaaagataagatggcggaggcctacagtgagattgggatgaaaggcgagcgccggaggggcaaggggcacgatggcctttaccagggtctcagtacagccaccaaggacacctacgacgcccttcacatgcaggccctgccccctcgctaa

SEQ ID NO: 8451 - DNA, 1491 bp, synthetic construct
  source 1..1491: mol_type = other DNA
atggccttaccagtgaccgccttgctcctgccgctggccttgctgctccacgccgccaggccggcccgcagcgagaagcgctaccgcggaggcagcggagacatccagatgacacagagccctagcagcctgtctgccagcgtgggagacagagtgaccatcacatgcaaggccagccaggatgtgggcacagccgtggattggtatcagcagaagcctggcaaggcccctaagctgctgatctactgggccagcacaagacacacaggcgtgcccagcagattttctggcagcggctctggcaccgacttcaccctgacaatatccagcctccagcctgaggacttcgccacctactactgccagcagtacaacagctaccctctgaccttcggccagggcaccaaggtggaaatcaaaagaggcggaggcggatctggcggcggaggtagcggtggcggaggatctgaagtgcagctggttgaatcaggtggcggcctggttcaacctggcggatctctgagactgagctgtgccgccagcggctacacctttaccgagtacacaatccactgggtccgacaggcccctggcaaaggacttgagtgggtcgccaacatcaaccccaacaatggcggcaccacctacaaccagaagttcgaggacagattcaccatcagccgggacaacagcaagaacaccctgtacctccagatgaactccctgagagccgaggacaccgccgtgtactattgtgccagaggctggaacttcgactactggggccagggaacactggtcaccgttagctctacgcgtaccacgacgccagcgccgcgaccaccaacaccggcgcccaccatcgcgtcgcagcccctgtccctgcgcccagaggcgtgccggccagcggcggggggcgcagtgcacacgagggggctggacttcgcctgtgacatctacatctgggcgcccttggccgggacttgtggggtccttctcctgtcactggttatcaccctttactgcaaacggggcagaaagaaactcctgtatatattcaaacaaccatttatgagaccagtacaaactactcaagaggaagatggctgtagctgccgatttccagaagaagaagaaggaggatgtgaactgagagtgaagttcagcaggagcgcagacgcccccgcgtaccagcagggccagaaccagctctataacgagctgaatctaggacgaagagaggagtacgatgttttggacaagagacgtggccgggaccctgagatggggggaaagccgagaaggaagaaccctcaggaaggcctgtacaatgaactgcagaaagataagatggcggaggcctacagtgagattgggatgaaaggcgagcgccggaggggcaaggggcacgatggcctttaccagggtctcagtacagccaccaaggacacctacgacgcccttcacatgcaggccctgccccctcgctaa

SEQ ID NO: 8452 - DNA, 1491 bp, synthetic construct
  source 1..1491: mol_type = other DNA
atggccttaccagtgaccgccttgctcctgccgctggccttgctgctccacgccgccaggccggcccgcagcgagctgcgctaccgcggaggcagcggagacatccagatgacacagagccctagcagcctgtctgccagcgtgggagacagagtgaccatcacatgcaaggccagccaggatgtgggcacagccgtggattggtatcagcagaagcctggcaaggcccctaagctgctgatctactgggccagcacaagacacacaggcgtgcccagcagattttctggcagcggctctggcaccgacttcaccctgacaatatccagcctccagcctgaggacttcgccacctactactgccagcagtacaacagctaccctctgaccttcggccagggcaccaaggtggaaatcaaaagaggcggaggcggatctggcggcggaggtagcggtggcggaggatctgaagtgcagctggttgaatcaggtggcggcctggttcaacctggcggatctctgagactgagctgtgccgccagcggctacacctttaccgagtacacaatccactgggtccgacaggcccctggcaaaggacttgagtgggtcgccaacatcaaccccaacaatggcggcaccacctacaaccagaagttcgaggacagattcaccatcagccgggacaacagcaagaacaccctgtacctccagatgaactccctgagagccgaggacaccgccgtgtactattgtgccagaggctggaacttcgactactggggccagggaacactggtcaccgttagctctacgcgtaccacgacgccagcgccgcgaccaccaacaccggcgcccaccatcgcgtcgcagcccctgtccctgcgcccagaggcgtgccggccagcggcggggggcgcagtgcacacgagggggctggacttcgcctgtgacatctacatctgggcgcccttggccgggacttgtggggtccttctcctgtcactggttatcaccctttactgcaaacggggcagaaagaaactcctgtatatattcaaacaaccatttatgagaccagtacaaactactcaagaggaagatggctgtagctgccgatttccagaagaagaagaaggaggatgtgaactgagagtgaagttcagcaggagcgcagacgcccccgcgtaccagcagggccagaaccagctctataacgagctgaatctaggacgaagagaggagtacgatgttttggacaagagacgtggccgggaccctgagatggggggaaagccgagaaggaagaaccctcaggaaggcctgtacaatgaactgcagaaagataagatggcggaggcctacagtgagattgggatgaaaggcgagcgccggaggggcaaggggcacgatggcctttaccagggtctcagtacagccaccaaggacacctacgacgcccttcacatgcaggccctgccccctcgctaa

SEQ ID NO: 8453 - DNA, 1491 bp, synthetic construct
  source 1..1491: mol_type = other DNA
atggccttaccagtgaccgccttgctcctgccgctggccttgctgctccacgccgccaggccggcccgcagcgagacccgctaccgcggaggcagcggagacatccagatgacacagagccctagcagcctgtctgccagcgtgggagacagagtgaccatcacatgcaaggccagccaggatgtgggcacagccgtggattggtatcagcagaagcctggcaaggcccctaagctgctgatctactgggccagcacaagacacacaggcgtgcccagcagattttctggcagcggctctggcaccgacttcaccctgacaatatccagcctccagcctgaggacttcgccacctactactgccagcagtacaacagctaccctctgaccttcggccagggcaccaaggtggaaatcaaaagaggcggaggcggatctggcggcggaggtagcggtggcggaggatctgaagtgcagctggttgaatcaggtggcggcctggttcaacctggcggatctctgagactgagctgtgccgccagcggctacacctttaccgagtacacaatccactgggtccgacaggcccctggcaaaggacttgagtgggtcgccaacatcaaccccaacaatggcggcaccacctacaaccagaagttcgaggacagattcaccatcagccgggacaacagcaagaacaccctgtacctccagatgaactccctgagagccgaggacaccgccgtgtactattgtgccagaggctggaacttcgactactggggccagggaacactggtcaccgttagctctacgcgtaccacgacgccagcgccgcgaccaccaacaccggcgcccaccatcgcgtcgcagcccctgtccctgcgcccagaggcgtgccggccagcggcggggggcgcagtgcacacgagggggctggacttcgcctgtgacatctacatctgggcgcccttggccgggacttgtggggtccttctcctgtcactggttatcaccctttactgcaaacggggcagaaagaaactcctgtatatattcaaacaaccatttatgagaccagtacaaactactcaagaggaagatggctgtagctgccgatttccagaagaagaagaaggaggatgtgaactgagagtgaagttcagcaggagcgcagacgcccccgcgtaccagcagggccagaaccagctctataacgagctgaatctaggacgaagagaggagtacgatgttttggacaagagacgtggccgggaccctgagatggggggaaagccgagaaggaagaaccctcaggaaggcctgtacaatgaactgcagaaagataagatggcggaggcctacagtgagattgggatgaaaggcgagcgccggaggggcaaggggcacgatggcctttaccagggtctcagtacagccaccaaggacacctacgacgcccttcacatgcaggccctgccccctcgctaa

SEQ ID NO: 8454 - DNA, 1491 bp, synthetic construct; identical to SEQ ID NO: 8435
  source 1..1491: mol_type = other DNA

SEQ ID NO: 8455 - DNA, 1491 bp, synthetic construct
  source 1..1491: mol_type = other DNA
atggccttaccagtgaccgccttgctcctgccgctggccttgctgctccacgccgccaggccggcccgcagcgaggaccactacaagggaggcagcggagacatccagatgacacagagccctagcagcctgtctgccagcgtgggagacagagtgaccatcacatgcaaggccagccaggatgtgggcacagccgtggattggtatcagcagaagcctggcaaggcccctaagctgctgatctactgggccagcacaagacacacaggcgtgcccagcagattttctggcagcggctctggcaccgacttcaccctgacaatatccagcctccagcctgaggacttcgccacctactactgccagcagtacaacagctaccctctgaccttcggccagggcaccaaggtggaaatcaaaagaggcggaggcggatctggcggcggaggtagcggtggcggaggatctgaagtgcagctggttgaatcaggtggcggcctggttcaacctggcggatctctgagactgagctgtgccgccagcggctacacctttaccgagtacacaatccactgggtccgacaggcccctggcaaaggacttgagtgggtcgccaacatcaaccccaacaatggcggcaccacctacaaccagaagttcgaggacagattcaccatcagccgggacaacagcaagaacaccctgtacctccagatgaactccctgagagccgaggacaccgccgtgtactattgtgccagaggctggaacttcgactactggggccagggaacactggtcaccgttagctctacgcgtaccacgacgccagcgccgcgaccaccaacaccggcgcccaccatcgcgtcgcagcccctgtccctgcgcccagaggcgtgccggccagcggcggggggcgcagtgcacacgagggggctggacttcgcctgtgacatctacatctgggcgcccttggccgggacttgtggggtccttctcctgtcactggttatcaccctttactgcaaacggggcagaaagaaactcctgtatatattcaaacaaccatttatgagaccagtacaaactactcaagaggaagatggctgtagctgccgatttccagaagaagaagaaggaggatgtgaactgagagtgaagttcagcaggagcgcagacgcccccgcgtaccagcagggccagaaccagctctataacgagctgaatctaggacgaagagaggagtacgatgttttggacaagagacgtggccgggaccctgagatggggggaaagccgagaaggaagaaccctcaggaaggcctgtacaatgaactgcagaaagataagatggcggaggcctacagtgagattgggatgaaaggcgagcgccggaggggcaaggggcacgatggcctttaccagggtctcagtacagccaccaaggacacctacgacgcccttcacatgcaggccctgccccctcgctaa

SEQ ID NO: 8456 - DNA, 1491 bp, synthetic construct
  source 1..1491: mol_type = other DNA
atggccttaccagtgaccgccttgctcctgccgctggccttgctgctccacgccgccaggccggcccgcagcgagagccgctacaagggaggcagcggagacatccagatgacacagagccctagcagcctgtctgccagcgtgggagacagagtgaccatcacatgcaaggccagccaggatgtgggcacagccgtggattggtatcagcagaagcctggcaaggcccctaagctgctgatctactgggccagcacaagacacacaggcgtgcccagcagattttctggcagcggctctggcaccgacttcaccctgacaatatccagcctccagcctgaggacttcgccacctactactgccagcagtacaacagctaccctctgaccttcggccagggcaccaaggtggaaatcaaaagaggcggaggcggatctggcggcggaggtagcggtggcggaggatctgaagtgcagctggttgaatcaggtggcggcctggttcaacctggcggatctctgagactgagctgtgccgccagcggctacacctttaccgagtacacaatccactgggtccgacaggcccctggcaaaggacttgagtgggtcgccaacatcaaccccaacaatggcggcaccacctacaaccagaagttcgaggacagattcaccatcagccgggacaacagcaagaacaccctgtacctccagatgaactccctgagagccgaggacaccgccgtgtactattgtgccagaggctggaacttcgactactggggccagggaacactggtcaccgttagctctacgcgtaccacgacgccagcgccgcgaccaccaacaccggcgcccaccatcgcgtcgcagcccctgtccctgcgcccagaggcgtgccggccagcggcggggggcgcagtgcacacgagggggctggacttcgcctgtgacatctacatctgggcgcccttggccgggacttgtggggtccttctcctgtcactggttatcaccctttactgcaaacggggcagaaagaaactcctgtatatattcaaacaaccatttatgagaccagtacaaactactcaagaggaagatggctgtagctgccgatttccagaagaagaagaaggaggatgtgaactgagagtgaagttcagcaggagcgcagacgcccccgcgtaccagcagggccagaaccagctctataacgagctgaatctaggacgaagagaggagtacgatgttttggacaagagacgtggccgggaccctgagatggggggaaagccgagaaggaagaaccctcaggaaggcctgtacaatgaactgcagaaagataagatggcggaggcctacagtgagattgggatgaaaggcgagcgccggaggggcaaggggcacgatggcctttaccagggtctcagtacagccaccaaggacacctacgacgcccttcacatgcaggccctgccccctcgctaa

SEQ ID NO: 8457 - DNA, 1491 bp, synthetic construct
  source 1..1491: mol_type = other DNA
atggccttaccagtgaccgccttgctcctgccgctggccttgctgctccacgccgccaggccggcccgcagcgagaaccgctacaagggaggcagcggagacatccagatgacacagagccctagcagcctgtctgccagcgtgggagacagagtgaccatcacatgcaaggccagccaggatgtgggcacagccgtggattggtatcagcagaagcctggcaaggcccctaagctgctgatctactgggccagcacaagacacacaggcgtgcccagcagattttctggcagcggctctggcaccgacttcaccctgacaatatccagcctccagcctgaggacttcgccacctactactgccagcagtacaacagctaccctctgaccttcggccagggcaccaaggtggaaatcaaaagaggcggaggcggatctggcggcggaggtagcggtggcggaggatctgaagtgcagctggttgaatcaggtggcggcctggttcaacctggcggatctctgagactgagctgtgccgccagcggctacacctttaccgagtacacaatccactgggtccgacaggcccctggcaaaggacttgagtgggtcgccaacatcaaccccaacaatggcggcaccacctacaaccagaagttcgaggacagattcaccatcagccgggacaacagcaagaacaccctgtacctccagatgaactccctgagagccgaggacaccgccgtgtactattgtgccagaggctggaacttcgactactggggccagggaacactggtcaccgttagctctacgcgtaccacgacgccagcgccgcgaccaccaacaccggcgcccaccatcgcgtcgcagcccctgtccctgcgcccagaggcgtgccggccagcggcggggggcgcagtgcacacgagggggctggacttcgcctgtgacatctacatctgggcgcccttggccgggacttgtggggtccttctcctgtcactggttatcaccctttactgcaaacggggcagaaagaaactcctgtatatattcaaacaaccatttatgagaccagtacaaactactcaagaggaagatggctgtagctgccgatttccagaagaagaagaaggaggatgtgaactgagagtgaagttcagcaggagcgcagacgcccccgcgtaccagcagggccagaaccagctctataacgagctgaatctaggacgaagagaggagtacgatgttttggacaagagacgtggccgggaccctgagatggggggaaagccgagaaggaagaaccctcaggaaggcctgtacaatgaactgcagaaagataagatggcggaggcctacagtgagattgggatgaaaggcgagcgccggaggggcaaggggcacgatggcctttaccagggtctcagtacagccaccaaggacacctacgacgcccttcacatgcaggccctgccccctcgctaa

SEQ ID NO: 8458 - DNA, 1491 bp, synthetic construct
  source 1..1491: mol_type = other DNA
atggccttaccagtgaccgccttgctcctgccgctggccttgctgctccacgccgccaggccggcccgcagcgagggccgctacaagggaggcagcggagacatccagatgacacagagccctagcagcctgtctgccagcgtgggagacagagtgaccatcacatgcaaggccagccaggatgtgggcacagccgtggattggtatcagcagaagcctggcaaggcccctaagctgctgatctactgggccagcacaagacacacaggcgtgcccagcagattttctggcagcggctctggcaccgacttcaccctgacaatatccagcctccagcctgaggacttcgccacctactactgccagcagtacaacagctaccctctgaccttcggccagggcaccaaggtggaaatcaaaagaggcggaggcggatctggcggcggaggtagcggtggcggaggatctgaagtgcagctggttgaatcaggtggcggcctggttcaacctggcggatctctgagactgagctgtgccgccagcggctacacctttaccgagtacacaatccactgggtccgacaggcccctggcaaaggacttgagtgggtcgccaacatcaaccccaacaatggcggcaccacctacaaccagaagttcgaggacagattcaccatcagccgggacaacagcaagaacaccctgtacctccagatgaactccctgagagccgaggacaccgccgtgtactattgtgccagaggctggaacttcgactactggggccagggaacactggtcaccgttagctctacgcgtaccacgacgccagcgccgcgaccaccaacaccggcgcccaccatcgcgtcgcagcccctgtccctgcgcccagaggcgtgccggccagcggcggggggcgcagtgcacacgagggggctggacttcgcctgtgacatctacatctgggcgcccttggccgggacttgtggggtccttctcctgtcactggttatcaccctttactgcaaacggggcagaaagaaactcctgtatatattcaaacaaccatttatgagaccagtacaaactactcaagaggaagatggctgtagctgccgatttccagaagaagaagaaggaggatgtgaactgagagtgaagttcagcaggagcgcagacgcccccgcgtaccagcagggccagaaccagctctataacgagctgaatctaggacgaagagaggagtacgatgttttggacaagagacgtggccgggaccctgagatggggggaaagccgagaaggaagaaccctcaggaaggcctgtacaatgaactgcagaaagataagatggcggaggcctacagtgagattgggatgaaaggcgagcgccggaggggcaaggggcacgatggcctttaccagggtctcagtacagccaccaaggacacctacgacgcccttcacatgcaggccctgccccctcgctaa

SEQ ID NO: 8459 - DNA, 1491 bp, synthetic construct
  source 1..1491: mol_type = other DNA
atggccttaccagtgaccgccttgctcctgccgctggccttgctgctccacgccgccaggccggcccgcagcgaggcccgctacaagggaggcagcggagacatccagatgacacagagccctagcagcctgtctgccagcgtgggagacagagtgaccatcacatgcaaggccagccaggatgtgggcacagccgtggattggtatcagcagaagcctggcaaggcccctaagctgctgatctactgggccagcacaagacacacaggcgtgcccagcagattttctggcagcggctctggcaccgacttcaccctgacaatatccagcctccagcctgaggacttcgccacctactactgccagcagtacaacagctaccctctgaccttcggccagggcaccaaggtggaaatcaaaagaggcggaggcggatctggcggcggaggtagcggtggcggaggatctgaagtgcagctggttgaatcaggtggcggcctggttcaacctggcggatctctgagactgagctgtgccgccagcggctacacctttaccgagtacacaatccactgggtccgacaggcccctggcaaaggacttgagtgggtcgccaacatcaaccccaacaatggcggcaccacctacaaccagaagttcgaggacagattcaccatcagccgggacaacagcaagaacaccctgtacctccagatgaactccctgagagccgaggacaccgccgtgtactattgtgccagaggctggaacttcgactactggggccagggaacactggtcaccgttagctctacgcgtaccacgacgccagcgccgcgaccaccaacaccggcgcccaccatcgcgtcgcagcccctgtccctgcgcccagaggcgtgccggccagcggcggggggcgcagtgcacacgagggggctggacttcgcctgtgacatctacatctgggcgcccttggccgggacttgtggggtccttctcctgtcactggttatcaccctttactgcaaacggggcagaaagaaactcctgtatatattcaaacaaccatttatgagaccagtacaaactactcaagaggaagatggctgtagctgccgatttccagaagaagaagaaggaggatgtgaactgagagtgaagttcagcaggagcgcagacgcccccgcgtaccagcagggccagaaccagctctataacgagctgaatctaggacgaagagaggagtacgatgttttggacaagagacgtggccgggaccctgagatggggggaaagccgagaaggaagaaccctcaggaaggcctgtacaatgaactgcagaaagataagatggcggaggcctacagtgagattgggatgaaaggcgagcgccggaggggcaaggggcacgatggcctttaccagggtctcagtacagccaccaaggacacctacgacgcccttcacatgcaggccctgccccctcgctaa

SEQ ID NO: 8460 - DNA, 1491 bp, synthetic construct
  source 1..1491: mol_type = other DNA
atggccttaccagtgaccgccttgctcctgccgctggccttgctgctccacgccgccaggccggcccgcagcgagaagcgctacaagggaggcagcggagacatccagatgacacagagccctagcagcctgtctgccagcgtgggagacagagtgaccatcacatgcaaggccagccaggatgtgggcacagccgtggattggtatcagcagaagcctggcaaggcccctaagctgctgatctactgggccagcacaagacacacaggcgtgcccagcagattttctggcagcggctctggcaccgacttcaccctgacaatatccagcctccagcctgaggacttcgccacctactactgccagcagtacaacagctaccctctgaccttcggccagggcaccaaggtggaaatcaaaagaggcggaggcggatctggcggcggaggtagcggtggcggaggatctgaagtgcagctggttgaatcaggtggcggcctggttcaacctggcggatctctgagactgagctgtgccgccagcggctacacctttaccgagtacacaatccactgggtccgacaggcccctggcaaaggacttgagtgggtcgccaacatcaaccccaacaatggcggcaccacctacaaccagaagttcgaggacagattcaccatcagccgggacaacagcaagaacaccctgtacctccagatgaactccctgagagccgaggacaccgccgtgtactattgtgccagaggctggaacttcgactactggggccagggaacactggtcaccgttagctctacgcgtaccacgacgccagcgccgcgaccaccaacaccggcgcccaccatcgcgtcgcagcccctgtccctgcgcccagaggcgtgccggccagcggcggggggcgcagtgcacacgagggggctggacttcgcctgtgacatctacatctgggcgcccttggccgggacttgtggggtccttctcctgtcactggttatcaccctttactgcaaacggggcagaaagaaactcctgtatatattcaaacaaccatttatgagaccagtacaaactactcaagaggaagatggctgtagctgccgatttccagaagaagaagaaggaggatgtgaactgagagtgaagttcagcaggagcgcagacgcccccgcgtaccagcagggccagaaccagctctataacgagctgaatctaggacgaagagaggagtacgatgttttggacaagagacgtggccgggaccctgagatggggggaaagccgagaaggaagaaccctcaggaaggcctgtacaatgaactgcagaaagataagatggcggaggcctacagtgagattgggatgaaaggcgagcgccggaggggcaaggggcacgatggcctttaccagggtctcagtacagccaccaaggacacctacgacgcccttcacatgcaggccctgccccctcgctaa

SEQ ID NO: 8461 - DNA, 1491 bp, synthetic construct
  source 1..1491: mol_type = other DNA
atggccttaccagtgaccgccttgctcctgccgctggccttgctgctccacgccgccaggccggcccgcagcgagctgcgctacaagggaggcagcggagacatccagatgacacagagccctagcagcctgtctgccagcgtgggagacagagtgaccatcacatgcaaggccagccaggatgtgggcacagccgtggattggtatcagcagaagcctggcaaggcccctaagctgctgatctactgggccagcacaagacacacaggcgtgcccagcagattttctggcagcggctctggcaccgacttcaccctgacaatatccagcctccagcctgaggacttcgccacctactactgccagcagtacaacagctaccctctgaccttcggccagggcaccaaggtggaaatcaaaagaggcggaggcggatctggcggcggaggtagcggtggcggaggatctgaagtgcagctggttgaatcaggtggcggcctggttcaacctggcggatctctgagactgagctgtgccgccagcggctacacctttaccgagtacacaatccactgggtccgacaggcccctggcaaaggacttgagtgggtcgccaacatcaaccccaacaatggcggcaccacctacaaccagaagttcgaggacagattcaccatcagccgggacaacagcaagaacaccctgtacctccagatgaactccctgagagccgaggacaccgccgtgtactattgtgccagaggctggaacttcgactactggggccagggaacactggtcaccgttagctctacgcgtaccacgacgccagcgccgcgaccaccaacaccggcgcccaccatcgcgtcgcagcccctgtccctgcgcccagaggcgtgccggccagcggcggggggcgcagtgcacacgagggggctggacttcgcctgtgacatctacatctgggcgcccttggccgggacttgtggggtccttctcctgtcactggttatcaccctttactgcaaacggggcagaaagaaactcctgtatatattcaaacaaccatttatgagaccagtacaaactactcaagaggaagatggctgtagctgccgatttccagaagaagaagaaggaggatgtgaactgagagtgaagttcagcaggagcgcagacgcccccgcgtaccagcagggccagaaccagctctataacgagctgaatctaggacgaagagaggagtacgatgttttggacaagagacgtggccgggaccctgagatggggggaaagccgagaaggaagaaccctcaggaaggcctgtacaatgaactgcagaaagataagatggcggaggcctacagtgagattgggatgaaaggcgagcgccggaggggcaaggggcacgatggcctttaccagggtctcagtacagccaccaaggacacctacgacgcccttcacatgcaggccctgccccctcgctaa

SEQ ID NO: 8462 - DNA, 1491 bp, synthetic construct
  source 1..1491: mol_type = other DNA
atggccttaccagtgaccgccttgctcctgccgctggccttgctgctccacgccgccaggccggcccgcagcgagacccgctacaagggaggcagcggagacatccagatgacacagagccctagcagcctgtctgccagcgtgggagacagagtgaccatcacatgcaaggccagccaggatgtgggcacagccgtggattggtatcagcagaagcctggcaaggcccctaagctgctgatctactgggccagcacaagacacacaggcgtgcccagcagattttctggcagcggctctggcaccgacttcaccctgacaatatccagcctccagcctgaggacttcgccacctactactgccagcagtacaacagctaccctctgaccttcggccagggcaccaaggtggaaatcaaaagaggcggaggcggatctggcggcggaggtagcggtggcggaggatctgaagtgcagctggttgaatcaggtggcggcctggttcaacctggcggatctctgagactgagctgtgccgccagcggctacacctttaccgagtacacaatccactgggtccgacaggcccctggcaaaggacttgagtgggtcgccaacatcaaccccaacaatggcggcaccacctacaaccagaagttcgaggacagattcaccatcagccgggacaacagcaagaacaccctgtacctccagatgaactccctgagagccgaggacaccgccgtgtactattgtgccagaggctggaacttcgactactggggccagggaacactggtcaccgttagctctacgcgtaccacgacgccagcgccgcgaccaccaacaccggcgcccaccatcgcgtcgcagcccctgtccctgcgcccagaggcgtgccggccagcggcggggggcgcagtgcacacgagggggctggacttcgcctgtgacatctacatctgggcgcccttggccgggacttgtggggtccttctcctgtcactggttatcaccctttactgcaaacggggcagaaagaaactcctgtatatattcaaacaaccatttatgagaccagtacaaactactcaagaggaagatggctgtagctgccgatttccagaagaagaagaaggaggatgtgaactgagagtgaagttcagcaggagcgcagacgcccccgcgtaccagcagggccagaaccagctctataacgagctgaatctaggacgaagagaggagtacgatgttttggacaagagacgtggccgggaccctgagatggggggaaagccgagaaggaagaaccctcaggaaggcctgtacaatgaactgcagaaagataagatggcggaggcctacagtgagattgggatgaaaggcgagcgccggaggggcaaggggcacgatggcctttaccagggtctcagtacagccaccaaggacacctacgacgcccttcacatgcaggccctgccccctcgctaa

SEQ ID NO: 8463 - DNA, 1491 bp, synthetic construct
  source 1..1491: mol_type = other DNA
atggccttaccagtgaccgccttgctcctgccgctggccttgctgctccacgccgccaggccggcccgcagcgagcagcgctacaagggaggcagcggagacatccagatgacacagagccctagcagcctgtctgccagcgtgggagacagagtgaccatcacatgcaaggccagccaggatgtgggcacagccgtggattggtatcagcagaagcctggcaaggcccctaagctgctgatctactgggccagcacaagacacacaggcgtgcccagcagattttctggcagcggctctggcaccgacttcaccctgacaatatccagcctccagcctgaggacttcgccacctactactgccagcagtacaacagctaccctctgaccttcggccagggcaccaaggtggaaatcaaaagaggcggaggcggatctggcggcggaggtagcggtggcggaggatctgaagtgcagctggttgaatcaggtggcggcctggttcaacctggcggatctctgagactgagctgtgccgccagcggctacacctttaccgagtacacaatccactgggtccgacaggcccctggcaaaggacttgagtgggtcgccaacatcaaccccaacaatggcggcaccacctacaaccagaagttcgaggacagattcaccatcagccgggacaacagcaagaacaccctgtacctccagatgaactccctgagagccgaggacaccgccgtgtactattgtgccagaggctggaacttcgactactggggccagggaacactggtcaccgttagctctacgcgtaccacgacgccagcgccgcgaccaccaacaccggcgcccaccatcgcgtcgcagcccctgtccctgcgcccagaggcgtgccggccagcggcggggggcgcagtgcacacgagggggctggacttcgcctgtgacatctacatctgggcgcccttggccgggacttgtggggtccttctcctgtcactggttatcaccctttactgcaaacggggcagaaagaaactcctgtatatattcaaacaaccatttatgagaccagtacaaactactcaagaggaagatggctgtagctgccgatttccagaagaagaagaaggaggatgtgaactgagagtgaagttcagcaggagcgcagacgcccccgcgtaccagcagggccagaaccagctctataacgagctgaatctaggacgaagagaggagtacgatgttttggacaagagacgtggccgggaccctgagatggggggaaagccgagaaggaagaaccctcaggaaggcctgtacaatgaactgcagaaagataagatggcggaggcctacagtgagattgggatgaaaggcgagcgccggaggggcaaggggcacgatggcctttaccagggtctcagtacagccaccaaggacacctacgacgcccttcacatgcaggccctgccccctcgctaa

SEQ ID NO: 8464 - DNA, 1488 bp, synthetic construct
  source 1..1488: mol_type = other DNA
atggccttaccagtgaccgccttgctcctgccgctggccttgctgctccacgccgccaggccgcgcagcgaggaccgctaccgcggaggcagcggagacatccagatgacacagagccctagcagcctgtctgccagcgtgggagacagagtgaccatcacatgcaaggccagccaggatgtgggcacagccgtggattggtatcagcagaagcctggcaaggcccctaagctgctgatctactgggccagcacaagacacacaggcgtgcccagcagattttctggcagcggctctggcaccgacttcaccctgacaatatccagcctccagcctgaggacttcgccacctactactgccagcagtacaacagctaccctctgaccttcggccagggcaccaaggtggaaatcaaaagaggcggaggcggatctggcggcggaggtagcggtggcggaggatctgaagtgcagctggttgaatcaggtggcggcctggttcaacctggcggatctctgagactgagctgtgccgccagcggctacacctttaccgagtacacaatccactgggtccgacaggcccctggcaaaggacttgagtgggtcgccaacatcaaccccaacaatggcggcaccacctacaaccagaagttcgaggacagattcaccatcagccgggacaacagcaagaacaccctgtacctccagatgaactccctgagagccgaggacaccgccgtgtactattgtgccagaggctggaacttcgactactggggccagggaacactggtcaccgttagctctacgcgtaccacgacgccagcgccgcgaccaccaacaccggcgcccaccatcgcgtcgcagcccctgtccctgcgcccagaggcgtgccggccagcggcggggggcgcagtgcacacgagggggctggacttcgcctgtgacatctacatctgggcgcccttggccgggacttgtggggtccttctcctgtcactggttatcaccctttactgcaaacggggcagaaagaaactcctgtatatattcaaacaaccatttatgagaccagtacaaactactcaagaggaagatggctgtagctgccgatttccagaagaagaagaaggaggatgtgaactgagagtgaagttcagcaggagcgcagacgcccccgcgtaccagcagggccagaaccagctctataacgagctgaatctaggacgaagagaggagtacgatgttttggacaagagacgtggccgggaccctgagatggggggaaagccgagaaggaagaaccctcaggaaggcctgtacaatgaactgcagaaagataagatggcggaggcctacagtgagattgggatgaaaggcgagcgccggaggggcaaggggcacgatggcctttaccagggtctcagtacagccaccaaggacacctacgacgcccttcacatgcaggccctgccccctcgctaa

SEQ ID NO: 8465 - DNA, 1491 bp, synthetic construct; identical to SEQ ID NO: 8418
  source 1..1491: mol_type = other DNA

SEQ ID NO: 8466 - DNA, 1491 bp, synthetic construct; identical to SEQ ID NO: 8446
  source 1..1491: mol_type = other DNA

SEQ ID NO: 8467 - DNA, 1491 bp, synthetic construct; identical to SEQ ID NO: 8453
  source 1..1491: mol_type = other DNA

SEQ ID NO: 8468 - DNA, 1491 bp, synthetic construct; identical to SEQ ID NO: 8447
  source 1..1491: mol_type = other DNA

SEQ ID NO: 8469 - DNA, 1491 bp, synthetic construct; identical to SEQ ID NO: 8448
  source 1..1491: mol_type = other DNA

SEQ ID NO: 8470 - DNA, 1488 bp, synthetic construct; identical to SEQ ID NO: 8417
  source 1..1488: mol_type = other DNA

SEQ ID NO: 8471 - DNA, 1491 bp, synthetic construct; identical to SEQ ID NO: 8418
  source 1..1491: mol_type = other DNA

SEQ ID NO: 8472 - DNA, 1494 bp, synthetic construct; identical to SEQ ID NO: 8419
  source 1..1494: mol_type = other DNA

SEQ ID NO: 8473 - DNA, 1497 bp, synthetic construct; identical to SEQ ID NO: 8420
  source 1..1497: mol_type = other DNA

SEQ ID NO: 8474 - DNA, 1500 bp, synthetic construct; identical to SEQ ID NO: 8421
  source 1..1500: mol_type = other DNA

SEQ ID NO: 8475 - DNA, 1503 bp, synthetic construct; identical to SEQ ID NO: 8422
  source 1..1503: mol_type = other DNA

SEQ ID NO: 8476 - DNA, 1506 bp, synthetic construct; identical to SEQ ID NO: 8423
  source 1..1506: mol_type = other DNA

SEQ ID NO: 8477 - DNA, 1509 bp, synthetic construct; identical to SEQ ID NO: 8424
  source 1..1509: mol_type = other DNA

SEQ ID NO: 8478 - DNA, 1512 bp, synthetic construct; identical to SEQ ID NO: 8425
  source 1..1512: mol_type = other DNA

SEQ ID NO: 8479 - DNA, 1515 bp, synthetic construct; identical to SEQ ID NO: 8426
  source 1..1515: mol_type = other DNA

SEQ ID NO: 8480 - DNA, 1515 bp, synthetic construct; identical to SEQ ID NO: 8427
  source 1..1515: mol_type = other DNA

SEQ ID NO: 8481 - DNA, 1500 bp, synthetic construct; identical to SEQ ID NO: 8421
  source 1..1500: mol_type = other DNA

SEQ ID NO: 8482 - DNA, 1500 bp, synthetic construct; identical to SEQ ID NO: 8429
  source 1..1500: mol_type = other DNA

SEQ ID NO: 8483 - DNA, 1500 bp, synthetic construct; identical to SEQ ID NO: 8430
  source 1..1500: mol_type = other DNA

SEQ ID NO: 8484 - DNA, 1500 bp, synthetic construct; identical to SEQ ID NO: 8431
  source 1..1500: mol_type = other DNA

SEQ ID NO: 8485 - DNA, 1500 bp, synthetic construct; identical to SEQ ID NO: 8432
  source 1..1500: mol_type = other DNA

SEQ ID NO: 8486 - DNA, 1500 bp, synthetic construct; identical to SEQ ID NO: 8433
  source 1..1500: mol_type = other DNA

SEQ ID NO: 8487 - DNA, 1512 bp, synthetic construct; identical to SEQ ID NO: 8382
  source 1..1512: mol_type = other DNA

SEQ ID NO: 8488 - DNA, 1512 bp, synthetic construct; identical to SEQ ID NO: 8381
  source 1..1512: mol_type = other DNA

SEQ ID NO: 8489 - DNA, 1509 bp, synthetic construct; identical to SEQ ID NO: 8380
  source 1..1509: mol_type = other DNA

SEQ ID NO: 8490 - DNA, 1506 bp, synthetic construct; identical to SEQ ID NO: 8379
  source 1..1506: mol_type = other DNA

SEQ ID NO: 8491 - DNA, 1503 bp, synthetic construct; identical to SEQ ID NO: 8378
  source 1..1503: mol_type = other DNA

SEQ ID NO: 8492 - DNA, 1500 bp, synthetic construct; identical to SEQ ID NO: 8377
  source 1..1500: mol_type = other DNA

SEQ ID NO: 8493 - DNA, 1497 bp, synthetic construct; identical to SEQ ID NO: 8376
  source 1..1497: mol_type = other DNA

SEQ ID NO: 8494 - DNA, 1494 bp, synthetic construct; identical to SEQ ID NO: 8375
  source 1..1494: mol_type = other DNA

SEQ ID NO: 8495 - DNA, 1491 bp, synthetic construct; identical to SEQ ID NO: 8374
  source 1..1491: mol_type = other DNA

SEQ ID NO: 8496 - DNA, 1488 bp, synthetic construct; identical to SEQ ID NO: 8464
  source 1..1488: mol_type = other DNA

SEQ ID NO: 8497 - DNA, 1488 bp, synthetic construct; identical to SEQ ID NO: 8392
  source 1..1488: mol_type = other DNA

SEQ ID NO: 8498 - DNA, 1488 bp, synthetic construct; identical to SEQ ID NO: 8393
  source 1..1488: mol_type = other DNA

SEQ ID NO: 8499 - DNA, 1488 bp, synthetic construct; identical to SEQ ID NO: 8394
  source 1..1488: mol_type = other DNA

SEQ ID NO: 8500 - DNA, 1488 bp, synthetic construct; identical to SEQ ID NO: 8395
  source 1..1488: mol_type = other DNA

SEQ ID NO: 8501 - DNA, 1488 bp, synthetic construct; identical to SEQ ID NO: 8396
  source 1..1488: mol_type = other DNA

SEQ ID NO: 8502 - DNA, 1488 bp, synthetic construct; identical to SEQ ID NO: 8397
  source 1..1488: mol_type = other DNA

SEQ ID NO: 8503 - DNA, 1488 bp, synthetic construct; identical to SEQ ID NO: 8398
  source 1..1488: mol_type = other DNA

SEQ ID NO: 8504 - DNA, 1488 bp, synthetic construct; identical to SEQ ID NO: 8399
  source 1..1488: mol_type = other DNA

SEQ ID NO: 8505 - DNA, 1488 bp, synthetic construct; identical to SEQ ID NO: 8402
  source 1..1488: mol_type = other DNA

SEQ ID NO: 8506 - DNA, 1488 bp, synthetic construct; identical to SEQ ID NO: 8403
  source 1..1488: mol_type = other DNA

SEQ ID NO: 8507 - DNA, 1488 bp, synthetic construct
  source 1..1488: mol_type = other DNA
atggccttaccagtgaccgccttgctcctgccgctggccttgctgctccacgccgccaggccgcgcagcgagtaccgctaccgcggaggcagcggagacatccagatgacacagagccctagcagcctgtctgccagcgtgggagacagagtgaccatcacatgcaaggccagccaggatgtgggcacagccgtggattggtatcagcagaagcctggcaaggcccctaagctgctgatctactgggccagcacaagacacacaggcgtgcccagcagattttctggcagcggctctggcaccgacttcaccctgacaatatccagcctccagcctgaggacttcgccacctactactgccagcagtacaacagctaccctctgaccttcggccagggcaccaaggtggaaatcaaaagaggcggaggcggatctggcggcggaggtagcggtggcggaggatctgaagtgcagctggttgaatcaggtggcggcctggttcaacctggcggatctctgagactgagctgtgccgccagcggctacacctttaccgagtacacaatccactgggtccgacaggcccctggcaaaggacttgagtgggtcgccaacatcaaccccaacaatggcggcaccacctacaaccagaagttcgaggacagattcaccatcagccgggacaacagcaagaacaccctgtacctccagatgaactccctgagagccgaggacaccgccgtgtactattgtgccagaggctggaacttcgactactggggccagggaacactggtcaccgttagctctacgcgtaccacgacgccagcgccgcgaccaccaacaccggcgcccaccatcgcgtcgcagcccctgtccctgcgcccagaggcgtgccggccagcggcggggggcgcagtgcacacgagggggctggacttcgcctgtgacatctacatctgggcgcccttggccgggacttgtggggtccttctcctgtcactggttatcaccctttactgcaaacggggcagaaagaaactcctgtatatattcaaacaaccatttatgagaccagtacaaactactcaagaggaagatggctgtagctgccgatttccagaagaagaagaaggaggatgtgaactgagagtgaagttcagcaggagcgcagacgcccccgcgtaccagcagggccagaaccagctctataacgagctgaatctaggacgaagagaggagtacgatgttttggacaagagacgtggccgggaccctgagatggggggaaagccgagaaggaagaaccctcaggaaggcctgtacaatgaactgcagaaagataagatggcggaggcctacagtgagattgggatgaaaggcgagcgccggaggggcaaggggcacgatggcctttaccagggtctcagtacagccaccaaggacacctacgacgcccttcacatgcaggccctgccccctcgctaa

SEQ ID NO: 8508 - DNA, 1488 bp, synthetic construct
  source 1..1488: mol_type = other DNA
atggccttaccagtgaccgccttgctcctgccgctggccttgctgctccacgccgccaggccgcgcagcgagtggcgctaccgcggaggcagcggagacatccagatgacacagagccctagcagcctgtctgccagcgtgggagacagagtgaccatcacatgcaaggccagccaggatgtgggcacagccgtggattggtatcagcagaagcctggcaaggcccctaagctgctgatctactgggccagcacaagacacacaggcgtgcccagcagattttctggcagcggctctggcaccgacttcaccctgacaatatccagcctccagcctgaggacttcgccacctactactgccagcagtacaacagctaccctctgaccttcggccagggcaccaaggtggaaatcaaaagaggcggaggcggatctggcggcggaggtagcggtggcggaggatctgaagtgcagctggttgaatcaggtggcggcctggttcaacctggcggatctctgagactgagctgtgccgccagcggctacacctttaccgagtacacaatccactgggtccgacaggcccctggcaaaggacttgagtgggtcgccaacatcaaccccaacaatggcggcaccacctacaaccagaagttcgaggacagattcaccatcagccgggacaacagcaagaacaccctgtacctccagatgaactccctgagagccgaggacaccgccgtgtactattgtgccagaggctggaacttcgactactggggccagggaacactggtcaccgttagctctacgcgtaccacgacgccagcgccgcgaccaccaacaccggcgcccaccatcgcgtcgcagcccctgtccctgcgcccagaggcgtgccggccagcggcggggggcgcagtgcacacgagggggctggacttcgcctgtgacatctacatctgggcgcccttggccgggacttgtggggtccttctcctgtcactggttatcaccctttactgcaaacggggcagaaagaaactcctgtatatattcaaacaaccatttatgagaccagtacaaactactcaagaggaagatggctgtagctgccgatttccagaagaagaagaaggaggatgtgaactgagagtgaagttcagcaggagcgcagacgcccccgcgtaccagcagggccagaaccagctctataacgagctgaatctaggacgaagagaggagtacgatgttttggacaagagacgtggccgggaccctgagatggggggaaagccgagaaggaagaaccctcaggaaggcctgtacaatgaactgcagaaagataagatggcggaggcctacagtgagattgggatgaaaggcgagcgccggaggggcaaggggcacgatggcctttaccagggtctcagtacagccaccaaggacacctacgacgcccttcacatgcaggccctgccccctcgctaa

SEQ ID NO: 8509 - DNA, 1488 bp, synthetic construct
  source 1..1488: mol_type = other DNA
atggccttaccagtgaccgccttgctcctgccgctggccttgctgctccacgccgccaggccgcgcagcgagcgccgctaccgcggaggcagcggagacatccagatgacacagagccctagcagcctgtctgccagcgtgggagacagagtgaccatcacatgcaaggccagccaggatgtgggcacagccgtggattggtatcagcagaagcctggcaaggcccctaagctgctgatctactgggccagcacaagacacacaggcgtgcccagcagattttctggcagcggctctggcaccgacttcaccctgacaatatccagcctccagcctgaggacttcgccacctactactgccagcagtacaacagctaccctctgaccttcggccagggcaccaaggtggaaatcaaaagaggcggaggcggatctggcggcggaggtagcggtggcggaggatctgaagtgcagctggttgaatcaggtggcggcctggttcaacctggcggatctctgagactgagctgtgccgccagcggctacacctttaccgagtacacaatccactgggtccgacaggcccctggcaaaggacttgagtgggtcgccaacatcaaccccaacaatggcggcaccacctacaaccagaagttcgaggacagattcaccatcagccgggacaacagcaagaacaccctgtacctccagatgaactccctgagagccgaggacaccgccgtgtactattgtgccagaggctggaacttcgactactggggccagggaacactggtcaccgttagctctacgcgtaccacgacgccagcgccgcgaccaccaacaccggcgcccaccatcgcgtcgcagcccctgtccctgcgcccagaggcgtgccggccagcggcggggggcgcagtgcacacgagggggctggacttcgcctgtgacatctacatctgggcgcccttggccgggacttgtggggtccttctcctgtcactggttatcaccctttactgcaaacggggcagaaagaaactcctgtatatattcaaacaaccatttatgagaccagtacaaactactcaagaggaagatggctgtagctgccgatttccagaagaagaagaaggaggatgtgaactgagagtgaagttcagcaggagcgcagacgcccccgcgtaccagcagggccagaaccagctctataacgagctgaatctaggacgaagagaggagtacgatgttttggacaagagacgtggccgggaccctgagatggggggaaagccgagaaggaagaaccctcaggaaggcctgtacaatgaactgcagaaagataagatggcggaggcctacagtgagattgggatgaaaggcgagcgccggaggggcaaggggcacgatggcctttaccagggtctcagtacagccaccaaggacacctacgacgcccttcacatgcaggccctgccccctcgctaa

SEQ ID NO: 8510 - DNA, 1488 bp, synthetic construct
  source 1..1488: mol_type = other DNA
atggccttaccagtgaccgccttgctcctgccgctggccttgctgctccacgccgccaggccgcgcagcgaggtgcgctaccgcggaggcagcggagacatccagatgacacagagccctagcagcctgtctgccagcgtgggagacagagtgaccatcacatgcaaggccagccaggatgtgggcacagccgtggattggtatcagcagaagcctggcaaggcccctaagctgctgatctactgggccagcacaagacacacaggcgtgcccagcagattttctggcagcggctctggcaccgacttcaccctgacaatatccagcctccagcctgaggacttcgccacctactactgccagcagtacaacagctaccctctgaccttcggccagggcaccaaggtggaaatcaaaagaggcggaggcggatctggcggcggaggtagcggtggcggaggatctgaagtgcagctggttgaatcaggtggcggcctggttcaacctggcggatctctgagactgagctgtgccgccagcggctacacctttaccgagtacacaatccactgggtccgacaggcccctggcaaaggacttgagtgggtcgccaacatcaaccccaacaatggcggcaccacctacaaccagaagttcgaggacagattcaccatcagccgggacaacagcaagaacaccctgtacctccagatgaactccctgagagccgaggacaccgccgtgtactattgtgccagaggctggaacttcgactactggggccagggaacactggtcaccgttagctctacgcgtaccacgacgccagcgccgcgaccaccaacaccggcgcccaccatcgcgtcgcagcccctgtccctgcgcccagaggcgtgccggccagcggcggggggcgcagtgcacacgagggggctggacttcgcctgtgacatctacatctgggcgcccttggccgggacttgtggggtccttctcctgtcactggttatcaccctttactgcaaacggggcagaaagaaactcctgtatatattcaaacaaccatttatgagaccagtacaaactactcaagaggaagatggctgtagctgccgatttccagaagaagaagaaggaggatgtgaactgagagtgaagttcagcaggagcgcagacgcccccgcgtaccagcagggccagaaccagctctataacgagctgaatctaggacgaagagaggagtacgatgttttggacaagagacgtggccgggaccctgagatggggggaaagccgagaaggaagaaccctcaggaaggcctgtacaatgaactgcagaaagataagatggcggaggcctacagtgagattgggatgaaaggcgagcgccggaggggcaaggggcacgatggcctttaccagggtctcagtacagccaccaaggacacctacgacgcccttcacatgcaggccctgccccctcgctaa

SEQ ID NO: 8511 - DNA, 1488 bp, synthetic construct
  source 1..1488: mol_type = other DNA
atggccttaccagtgaccgccttgctcctgccgctggccttgctgctccacgccgccaggccgcgcatcgaggaccgctaccgcggaggcagcggagacatccagatgacacagagccctagcagcctgtctgccagcgtgggagacagagtgaccatcacatgcaaggccagccaggatgtgggcacagccgtggattggtatcagcagaagcctggcaaggcccctaagctgctgatctactgggccagcacaagacacacaggcgtgcccagcagattttctggcagcggctctggcaccgacttcaccctgacaatatccagcctccagcctgaggacttcgccacctactactgccagcagtacaacagctaccctctgaccttcggccagggcaccaaggtggaaatcaaaagaggcggaggcggatctggcggcggaggtagcggtggcggaggatctgaagtgcagctggttgaatcaggtggcggcctggttcaacctggcggatctctgagactgagctgtgccgccagcggctacacctttaccgagtacacaatccactgggtccgacaggcccctggcaaaggacttgagtgggtcgccaacatcaaccccaacaatggcggcaccacctacaaccagaagttcgaggacagattcaccatcagccgggacaacagcaagaacaccctgtacctccagatgaactccctgagagccgaggacaccgccgtgtactattgtgccagaggctggaacttcgactactggggccagggaacactggtcaccgttagctctacgcgtaccacgacgccagcgccgcgaccaccaacaccggcgcccaccatcgcgtcgcagcccctgtccctgcgcccagaggcgtgccggccagcggcggggggcgcagtgcacacgagggggctggacttcgcctgtgacatctacatctgggcgcccttggccgggacttgtggggtccttctcctgtcactggttatcaccctttactgcaaacggggcagaaagaaactcctgtatatattcaaacaaccatttatgagaccagtacaaactactcaagaggaagatggctgtagctgccgatttccagaagaagaagaaggaggatgtgaactgagagtgaagttcagcaggagcgcagacgcccccgcgtaccagcagggccagaaccagctctataacgagctgaatctaggacgaagagaggagtacgatgttttggacaagagacgtggccgggaccctgagatggggggaaagccgagaaggaagaaccctcaggaaggcctgtacaatgaactgcagaaagataagatggcggaggcctacagtgagattgggatgaaaggcgagcgccggaggggcaaggggcacgatggcctttaccagggtctcagtacagccaccaaggacacctacgacgcccttcacatgcaggccctgccccctcgctaa

SEQ ID NO: 8512 - DNA, 1488 bp, synthetic construct
  source 1..1488: mol_type = other DNA
atggccttaccagtgaccgccttgctcctgccgctggccttgctgctccacgccgccaggccgcgcctggaggaccgctaccgcggaggcagcggagacatccagatgacacagagccctagcagcctgtctgccagcgtgggagacagagtgaccatcacatgcaaggccagccaggatgtgggcacagccgtggattggtatcagcagaagcctggcaaggcccctaagctgctgatctactgggccagcacaagacacacaggcgtgcccagcagattttctggcagcggctctggcaccgacttcaccctgacaatatccagcctccagcctgaggacttcgccacctactactgccagcagtacaacagctaccctctgaccttcggccagggcaccaaggtggaaatcaaaagaggcggaggcggatctggcggcggaggtagcggtggcggaggatctgaagtgcagctggttgaatcaggtggcggcctggttcaacctggcggatctctgagactgagctgtgccgccagcggctacacctttaccgagtacacaatccactgggtccgacaggcccctggcaaaggacttgagtgggtcgccaacatcaaccccaacaatggcggcaccacctacaaccagaagttcgaggacagattcaccatcagccgggacaacagcaagaacaccctgtacctccagatgaactccctgagagccgaggacaccgccgtgtactattgtgccagaggctggaacttcgactactggggccagggaacactggtcaccgttagctctacgcgtaccacgacgccagcgccgcgaccaccaacaccggcgcccaccatcgcgtcgcagcccctgtccctgcgcccagaggcgtgccggccagcggcggggggcgcagtgcacacgagggggctggacttcgcctgtgacatctacatctgggcgcccttggccgggacttgtggggtccttctcctgtcactggttatcaccctttactgcaaacggggcagaaagaaactcctgtatatattcaaacaaccatttatgagaccagtacaaactactcaagaggaagatggctgtagctgccgatttccagaagaagaagaaggaggatgtgaactgagagtgaagttcagcaggagcgcagacgcccccgcgtaccagcagggccagaaccagctctataacgagctgaatctaggacgaagagaggagtacgatgttttggacaagagacgtggccgggaccctgagatggggggaaagccgagaaggaagaaccctcaggaaggcctgtacaatgaactgcagaaagataagatggcggaggcctacagtgagattgggatgaaaggcgagcgccggaggggcaaggggcacgatggcctttaccagggtctcagtacagccaccaaggacacctacgacgcccttcacatgcaggccctgccccctcgctaa

SEQ ID NO: 8513 - DNA, 1488 bp, synthetic construct
  source 1..1488: mol_type = other DNA
atggccttaccagtgaccgccttgctcctgccgctggccttgctgctccacgccgccaggccgcgcatggaggaccgctaccgcggaggcagcggagacatccagatgacacagagccctagcagcctgtctgccagcgtgggagacagagtgaccatcacatgcaaggccagccaggatgtgggcacagccgtggattggtatcagcagaagcctggcaaggcccctaagctgctgatctactgggccagcacaagacacacaggcgtgcccagcagattttctggcagcggctctggcaccgacttcaccctgacaatatccagcctccagcctgaggacttcgccacctactactgccagcagtacaacagctaccctctgaccttcggccagggcaccaaggtggaaatcaaaagaggcggaggcggatctggcggcggaggtagcggtggcggaggatctgaagtgcagctggttgaatcaggtggcggcctggttcaacctggcggatctctgagactgagctgtgccgccagcggctacacctttaccgagtacacaatccactgggtccgacaggcccctggcaaaggacttgagtgggtcgccaacatcaaccccaacaatggcggcaccacctacaaccagaagttcgaggacagattcaccatcagccgggacaacagcaagaacaccctgtacctccagatgaactccctgagagccgaggacaccgccgtgtactattgtgccagaggctggaacttcgactactggggccagggaacactggtcaccgttagctctacgcgtaccacgacgccagcgccgcgaccaccaacaccggcgcccaccatcgcgtcgcagcccctgtccctgcgcccagaggcgtgccggccagcggcggggggcgcagtgcacacgagggggctggacttcgcctgtgacatctacatctgggcgcccttggccgggacttgtggggtccttctcctgtcactggttatcaccctttactgcaaacggggcagaaagaaactcctgtatatattcaaacaaccatttatgagaccagtacaaactactcaagaggaagatggctgtagctgccgatttccagaagaagaagaaggaggatgtgaactgagagtgaagttcagcaggagcgcagacgcccccgcgtaccagcagggccagaaccagctctataacgagctgaatctaggacgaagagaggagtacgatgttttggacaagagacgtggccgggaccctgagatggggggaaagccgagaaggaagaaccctcaggaaggcctgtacaatgaactgcagaaagataagatggcggaggcctacagtgagattgggatgaaaggcgagcgccggaggggcaaggggcacgatggcctttaccagggtctcagtacagccaccaaggacacctacgacgcccttcacatgcaggccctgccccctcgctaa

SEQ ID NO: 8514 - DNA, 1488 bp, synthetic construct
  source 1..1488: mol_type = other DNA
atggccttaccagtgaccgccttgctcctgccgctggccttgctgctccacgccgccaggccgcgcgtggaggaccgctaccgcggaggcagcggagacatccagatgacacagagccctagcagcctgtctgccagcgtgggagacagagtgaccatcacatgcaaggccagccaggatgtgggcacagccgtggattggtatcagcagaagcctggcaaggcccctaagctgctgatctactgggccagcacaagacacacaggcgtgcccagcagattttctggcagcggctctggcaccgacttcaccctgacaatatccagcctccagcctgaggacttcgccacctactactgccagcagtacaacagctaccctctgaccttcggccagggcaccaaggtggaaatcaaaagaggcggaggcggatctggcggcggaggtagcggtggcggaggatctgaagtgcagctggttgaatcaggtggcggcctggttcaacctggcggatctctgagactgagctgtgccgccagcggctacacctttaccgagtacacaatccactgggtccgacaggcccctggcaaaggacttgagtgggtcgccaacatcaaccccaacaatggcggcaccacctacaaccagaagttcgaggacagattcaccatcagccgggacaacagcaagaacaccctgtacctccagatgaactccctgagagccgaggacaccgccgtgtactattgtgccagaggctggaacttcgactactggggccagggaacactggtcaccgttagctctacgcgtaccacgacgccagcgccgcgaccaccaacaccggcgcccaccatcgcgtcgcagcccctgtccctgcgcccagaggcgtgccggccagcggcggggggcgcagtgcacacgagggggctggacttcgcctgtgacatctacatctgggcgcccttggccgggacttgtggggtccttctcctgtcactggttatcaccctttactgcaaacggggcagaaagaaactcctgtatatattcaaacaaccatttatgagaccagtacaaactactcaagaggaagatggctgtagctgccgatttccagaagaagaagaaggaggatgtgaactgagagtgaagttcagcaggagcgcagacgcccccgcgtaccagcagggccagaaccagctctataacgagctgaatctaggacgaagagaggagtacgatgttttggacaagagacgtggccgggaccctgagatggggggaaagccgagaaggaagaaccctcaggaaggcctgtacaatgaactgcagaaagataagatggcggaggcctacagtgagattgggatgaaaggcgagcgccggaggggcaaggggcacgatggcctttaccagggtctcagtacagccaccaaggacacctacgacgcccttcacatgcaggccctgccccctcgctaa

SEQ ID NO: 8515 - DNA, 1488 bp, synthetic construct
  source 1..1488: mol_type = other DNA
atggccttaccagtgaccgccttgctcctgccgctggccttgctgctccacgccgccaggccgcgcgccgaggaccgctaccgcggaggcagcggagacatccagatgacacagagccctagcagcctgtctgccagcgtgggagacagagtgaccatcacatgcaaggccagccaggatgtgggcacagccgtggattggtatcagcagaagcctggcaaggcccctaagctgctgatctactgggccagcacaagacacacaggcgtgcccagcagattttctggcagcggctctggcaccgacttcaccctgacaatatccagcctccagcctgaggacttcgccacctactactgccagcagtacaacagctaccctctgaccttcggccagggcaccaaggtggaaatcaaaagaggcggaggcggatctggcggcggaggtagcggtggcggaggatctgaagtgcagctggttgaatcaggtggcggcctggttcaacctggcggatctctgagactgagctgtgccgccagcggctacacctttaccgagtacacaatccactgggtccgacaggcccctggcaaaggacttgagtgggtcgccaacatcaaccccaacaatggcggcaccacctacaaccagaagttcgaggacagattcaccatcagccgggacaacagcaagaacaccctgtacctccagatgaactccctgagagccgaggacaccgccgtgtactattgtgccagaggctggaacttcgactactggggccagggaacactggtcaccgttagctctacgcgtaccacgacgccagcgccgcgaccaccaacaccggcgcccaccatcgcgtcgcagcccctgtccctgcgcccagaggcgtgccggccagcggcggggggcgcagtgcacacgagggggctggacttcgcctgtgacatctacatctgggcgcccttggccgggacttgtggggtccttctcctgtcactggttatcaccctttactgcaaacggggcagaaagaaactcctgtatatattcaaacaaccatttatgagaccagtacaaactactcaagaggaagatggctgtagctgccgatttccagaagaagaagaaggaggatgtgaactgagagtgaagttcagcaggagcgcagacgcccccgcgtaccagcagggccagaaccagctctataacgagctgaatctaggacgaagagaggagtacgatgttttggacaagagacgtggccgggaccctgagatggggggaaagccgagaaggaagaaccctcaggaaggcctgtacaatgaactgcagaaagataagatggcggaggcctacagtgagattgggatgaaaggcgagcgccggaggggcaaggggcacgatggcctttaccagggtctcagtacagccaccaaggacacctacgacgcccttcacatgcaggccctgccccctcgctaa

SEQ ID NO: 8516 - DNA, 1488 bp, synthetic construct
  source 1..1488: mol_type = other DNA
atggccttaccagtgaccgccttgctcctgccgctggccttgctgctccacgccgccaggccgcgcttcgaggaccgctaccgcggaggcagcggagacatccagatgacacagagccctagcagcctgtctgccagcgtgggagacagagtgaccatcacatgcaaggccagccaggatgtgggcacagccgtggattggtatcagcagaagcctggcaaggcccctaagctgctgatctactgggccagcacaagacacacaggcgtgcccagcagattttctggcagcggctctggcaccgacttcaccctgacaatatccagcctccagcctgaggacttcgccacctactactgccagcagtacaacagctaccctctgaccttcggccagggcaccaaggtggaaatcaaaagaggcggaggcggatctggcggcggaggtagcggtggcggaggatctgaagtgcagctggttgaatcaggtggcggcctggttcaacctggcggatctctgagactgagctgtgccgccagcggctacacctttaccgagtacacaatccactgggtccgacaggcccctggcaaaggacttgagtgggtcgccaacatcaaccccaacaatggcggcaccacctacaaccagaagttcgaggacagattcaccatcagccgggacaacagcaagaacaccctgtacctccagatgaactccctgagagccgaggacaccgccgtgtactattgtgccagaggctggaacttcgactactggggccagggaacactggtcaccgttagctctacgcgtaccacgacgccagcgccgcgaccaccaacaccggcgcccaccatcgcgtcgcagcccctgtccctgcgcccagaggcgtgccggccagcggcggggggcgcagtgcacacgagggggctggacttcgcctgtgacatctacatctgggcgcccttggccgggacttgtggggtccttctcctgtcactggttatcaccctttactgcaaacggggcagaaagaaactcctgtatatattcaaacaaccatttatgagaccagtacaaactactcaagaggaagatggctgtagctgccgatttccagaagaagaagaaggaggatgtgaactgagagtgaagttcagcaggagcgcagacgcccccgcgtaccagcagggccagaaccagctctataacgagctgaatctaggacgaagagaggagtacgatgttttggacaagagacgtggccgggaccctgagatggggggaaagccgagaaggaagaaccctcaggaaggcctgtacaatgaactgcagaaagataagatggcggaggcctacagtgagattgggatgaaaggcgagcgccggaggggcaaggggcacgatggcctttaccagggtctcagtacagccaccaaggacacctacgacgcccttcacatgcaggccctgccccctcgctaa

SEQ ID NO: 8517 - DNA, 1488 bp, synthetic construct
  source 1..1488: mol_type = other DNA
atggccttaccagtgaccgccttgctcctgccgctggccttgctgctccacgccgccaggccgcgccacgaggaccgctaccgcggaggcagcggagacatccagatgacacagagccctagcagcctgtctgccagcgtgggagacagagtgaccatcacatgcaaggccagccaggatgtgggcacagccgtggattggtatcagcagaagcctggcaaggcccctaagctgctgatctactgggccagcacaagacacacaggcgtgcccagcagattttctggcagcggctctggcaccgacttcaccctgacaatatccagcctccagcctgaggacttcgccacctactactgccagcagtacaacagctaccctctgaccttcggccagggcaccaaggtggaaatcaaaagaggcggaggcggatctggcggcggaggtagcggtggcggaggatctgaagtgcagctggttgaatcaggtggcggcctggttcaacctggcggatctctgagactgagctgtgccgccagcggctacacctttaccgagtacacaatccactgggtccgacaggcccctggcaaaggacttgagtgggtcgccaacatcaaccccaacaatggcggcaccacctacaaccagaagttcgaggacagattcaccatcagccgggacaacagcaagaacaccctgtacctccagatgaactccctgagagccgaggacaccgccgtgtactattgtgccagaggctggaacttcgactactggggccagggaacactggtcaccgttagctctacgcgtaccacgacgccagcgccgcgaccaccaacaccggcgcccaccatcgcgtcgcagcccctgtccctgcgcccagaggcgtgccggccagcggcggggggcgcagtgcacacgagggggctggacttcgcctgtgacatctacatctgggcgcccttggccgggacttgtggggtccttctcctgtcactggttatcaccctttactgcaaacggggcagaaagaaactcctgtatatattcaaacaaccatttatgagaccagtacaaactactcaagaggaagatggctgtagctgccgatttccagaagaagaagaaggaggatgtgaactgagagtgaagttcagcaggagcgcagacgcccccgcgtaccagcagggccagaaccagctctataacgagctgaatctaggacgaagagaggagtacgatgttttggacaagagacgtggccgggaccctgagatggggggaaagccgagaaggaagaaccctcaggaaggcctgtacaatgaactgcagaaagataagatggcggaggcctacagtgagattgggatgaaaggcgagcgccggaggggcaaggggcacgatggcctttaccagggtctcagtacagccaccaaggacacctacgacgcccttcacatgcaggccctgccccctcgctaa

SEQ ID NO: 8518 - DNA, 1488 bp, synthetic construct
  source 1..1488: mol_type = other DNA
atggccttaccagtgaccgccttgctcctgccgctggccttgctgctccacgccgccaggccgcgcggcgaggaccgctaccgcggaggcagcggagacatccagatgacacagagccctagcagcctgtctgccagcgtgggagacagagtgaccatcacatgcaaggccagccaggatgtgggcacagccgtggattggtatcagcagaagcctggcaaggcccctaagctgctgatctactgggccagcacaagacacacaggcgtgcccagcagattttctggcagcggctctggcaccgacttcaccctgacaatatccagcctccagcctgaggacttcgccacctactactgccagcagtacaacagctaccctctgaccttcggccagggcaccaaggtggaaatcaaaagaggcggaggcggatctggcggcggaggtagcggtggcggaggatctgaagtgcagctggttgaatcaggtggcggcctggttcaacctggcggatctctgagactgagctgtgccgccagcggctacacctttaccgagtacacaatccactgggtccgacaggcccctggcaaaggacttgagtgggtcgccaacatcaaccccaacaatggcggcaccacctacaaccagaagttcgaggacagattcaccatcagccgggacaacagcaagaacaccctgtacctccagatgaactccctgagagccgaggacaccgccgtgtactattgtgccagaggctggaacttcgactactggggccagggaacactggtcaccgttagctctacgcgtaccacgacgccagcgccgcgaccaccaacaccggcgcccaccatcgcgtcgcagcccctgtccctgcgcccagaggcgtgccggccagcggcggggggcgcagtgcacacgagggggctggacttcgcctgtgacatctacatctgggcgcccttggccgggacttgtggggtccttctcctgtcactggttatcaccctttactgcaaacggggcagaaagaaactcctgtatatattcaaacaaccatttatgagaccagtacaaactactcaagaggaagatggctgtagctgccgatttccagaagaagaagaaggaggatgtgaactgagagtgaagttcagcaggagcgcagacgcccccgcgtaccagcagggccagaaccagctctataacgagctgaatctaggacgaagagaggagtacgatgttttggacaagagacgtggccgggaccctgagatggggggaaagccgagaaggaagaaccctcaggaaggcctgtacaatgaactgcagaaagataagatggcggaggcctacagtgagattgggatgaaaggcgagcgccggaggggcaaggggcacgatggcctttaccagggtctcagtacagccaccaaggacacctacgacgcccttcacatgcaggccctgccccctcgctaa

SEQ ID NO: 8519 - DNA, 1488 bp, synthetic construct
  source 1..1488: mol_type = other DNA
atggccttaccagtgaccgccttgctcctgccgctggccttgctgctccacgccgccaggccgcgcaccgaggaccgctaccgcggaggcagcggagacatccagatgacacagagccctagcagcctgtctgccagcgtgggagacagagtgaccatcacatgcaaggccagccaggatgtgggcacagccgtggattggtatcagcagaagcctggcaaggcccctaagctgctgatctactgggccagcacaagacacacaggcgtgcccagcagattttctggcagcggctctggcaccgacttcaccctgacaatatccagcctccagcctgaggacttcgccacctactactgccagcagtacaacagctaccctctgaccttcggccagggcaccaaggtggaaatcaaaagaggcggaggcggatctggcggcggaggtagcggtggcggaggatctgaagtgcagctggttgaatcaggtggcggcctggttcaacctggcggatctctgagactgagctgtgccgccagcggctacacctttaccgagtacacaatccactgggtccgacaggcccctggcaaaggacttgagtgggtcgccaacatcaaccccaacaatggcggcaccacctacaaccagaagttcgaggacagattcaccatcagccgggacaacagcaagaacaccctgtacctccagatgaactccctgagagccgaggacaccgccgtgtactattgtgccagaggctggaacttcgactactggggccagggaacactggtcaccgttagctctacgcgtaccacgacgccagcgccgcgaccaccaacaccggcgcccaccatcgcgtcgcagcccctgtccctgcgcccagaggcgtgccggccagcggcggggggcgcagtgcacacgagggggctggacttcgcctgtgacatctacatctgggcgcccttggccgggacttgtggggtccttctcctgtcactggttatcaccctttactgcaaacggggcagaaagaaactcctgtatatattcaaacaaccatttatgagaccagtacaaactactcaagaggaagatggctgtagctgccgatttccagaagaagaagaaggaggatgtgaactgagagtgaagttcagcaggagcgcagacgcccccgcgtaccagcagggccagaaccagctctataacgagctgaatctaggacgaagagaggagtacgatgttttggacaagagacgtggccgggaccctgagatggggggaaagccgagaaggaagaaccctcaggaaggcctgtacaatgaactgcagaaagataagatggcggaggcctacagtgagattgggatgaaaggcgagcgccggaggggcaaggggcacgatggcctttaccagggtctcagtacagccaccaaggacacctacgacgcccttcacatgcaggccctgccccctcgctaa

SEQ ID NO: 8520 - DNA, 1488 bp, synthetic construct
  source 1..1488: mol_type = other DNA
atggccttaccagtgaccgccttgctcctgccgctggccttgctgctccacgccgccaggccgagcagcgaggaccgctaccgcggaggcagcggagacatccagatgacacagagccctagcagcctgtctgccagcgtgggagacagagtgaccatcacatgcaaggccagccaggatgtgggcacagccgtggattggtatcagcagaagcctggcaaggcccctaagctgctgatctactgggccagcacaagacacacaggcgtgcccagcagattttctggcagcggctctggcaccgacttcaccctgacaatatccagcctccagcctgaggacttcgccacctactactgccagcagtacaacagctaccctctgaccttcggccagggcaccaaggtggaaatcaaaagaggcggaggcggatctggcggcggaggtagcggtggcggaggatctgaagtgcagctggttgaatcaggtggcggcctggttcaacctggcggatctctgagactgagctgtgccgccagcggctacacctttaccgagtacacaatccactgggtccgacaggcccctggcaaaggacttgagtgggtcgccaacatcaaccccaacaatggcggcaccacctacaaccagaagttcgaggacagattcaccatcagccgggacaacagcaagaacaccctgtacctccagatgaactccctgagagccgaggacaccgccgtgtactattgtgccagaggctggaacttcgactactggggccagggaacactggtcaccgttagctctacgcgtaccacgacgccagcgccgcgaccaccaacaccggcgcccaccatcgcgtcgcagcccctgtccctgcgcccagaggcgtgccggccagcggcggggggcgcagtgcacacgagggggctggacttcgcctgtgacatctacatctgggcgcccttggccgggacttgtggggtccttctcctgtcactggttatcaccctttactgcaaacggggcagaaagaaactcctgtatatattcaaacaaccatttatgagaccagtacaaactactcaagaggaagatggctgtagctgccgatttccagaagaagaagaaggaggatgtgaactgagagtgaagttcagcaggagcgcagacgcccccgcgtaccagcagggccagaaccagctctataacgagctgaatctaggacgaagagaggagtacgatgttttggacaagagacgtggccgggaccctgagatggggggaaagccgagaaggaagaaccctcaggaaggcctgtacaatgaactgcagaaagataagatggcggaggcctacagtgagattgggatgaaaggcgagcgccggaggggcaaggggcacgatggcctttaccagggtctcagtacagccaccaaggacacctacgacgcccttcacatgcaggccctgccccctcgctaa

SEQ ID NO: 8521 - DNA, 1488 bp, synthetic construct
  source 1..1488: mol_type = other DNA
atggccttaccagtgaccgccttgctcctgccgctggccttgctgctccacgccgccaggccgcacagcgaggaccgctaccgcggaggcagcggagacatccagatgacacagagccctagcagcctgtctgccagcgtgggagacagagtgaccatcacatgcaaggccagccaggatgtgggcacagccgtggattggtatcagcagaagcctggcaaggcccctaagctgctgatctactgggccagcacaagacacacaggcgtgcccagcagattttctggcagcggctctggcaccgacttcaccctgacaatatccagcctccagcctgaggacttcgccacctactactgccagcagtacaacagctaccctctgaccttcggccagggcaccaaggtggaaatcaaaagaggcggaggcggatctggcggcggaggtagcggtggcggaggatctgaagtgcagctggttgaatcaggtggcggcctggttcaacctggcggatctctgagactgagctgtgccgccagcggctacacctttaccgagtacacaatccactgggtccgacaggcccctggcaaaggacttgagtgggtcgccaacatcaaccccaacaatggcggcaccacctacaaccagaagttcgaggacagattcaccatcagccgggacaacagcaagaacaccctgtacctccagatgaactccctgagagccgaggacaccgccgtgtactattgtgccagaggctggaacttcgactactggggccagggaacactggtcaccgttagctctacgcgtaccacgacgccagcgccgcgaccaccaacaccggcgcccaccatcgcgtcgcagcccctgtccctgcgcccagaggcgtgccggccagcggcggggggcgcagtgcacacgagggggctggacttcgcctgtgacatctacatctgggcgcccttggccgggacttgtggggtccttctcctgtcactggttatcaccctttactgcaaacggggcagaaagaaactcctgtatatattcaaacaaccatttatgagaccagtacaaactactcaagaggaagatggctgtagctgccgatttccagaagaagaagaaggaggatgtgaactgagagtgaagttcagcaggagcgcagacgcccccgcgtaccagcagggccagaaccagctctataacgagctgaatctaggacgaagagaggagtacgatgttttggacaagagacgtggccgggaccctgagatggggggaaagccgagaaggaagaaccctcaggaaggcctgtacaatgaactgcagaaagataagatggcggaggcctacagtgagattgggatgaaaggcgagcgccggaggggcaaggggcacgatggcctttaccagggtctcagtacagccaccaaggacacctacgacgcccttcacatgcaggccctgccccctcgctaa

SEQ ID NO: 8522 - DNA, 1488 bp, synthetic construct
  source 1..1488: mol_type = other DNA
atggccttaccagtgaccgccttgctcctgccgctggccttgctgctccacgccgccaggccggacagcgaggaccgctaccgcggaggcagcggagacatccagatgacacagagccctagcagcctgtctgccagcgtgggagacagagtgaccatcacatgcaaggccagccaggatgtgggcacagccgtggattggtatcagcagaagcctggcaaggcccctaagctgctgatctactgggccagcacaagacacacaggcgtgcccagcagattttctggcagcggctctggcaccgacttcaccctgacaatatccagcctccagcctgaggacttcgccacctactactgccagcagtacaacagctaccctctgaccttcggccagggcaccaaggtggaaatcaaaagaggcggaggcggatctggcggcggaggtagcggtggcggaggatctgaagtgcagctggttgaatcaggtggcggcctggttcaacctggcggatctctgagactgagctgtgccgccagcggctacacctttaccgagtacacaatccactgggtccgacaggcccctggcaaaggacttgagtgggtcgccaacatcaaccccaacaatggcggcaccacctacaaccagaagttcgaggacagattcaccatcagccgggacaacagcaagaacaccctgtacctccagatgaactccctgagagccgaggacaccgccgtgtactattgtgccagaggctggaacttcgactactggggccagggaacactggtcaccgttagctctacgcgtaccacgacgccagcgccgcgaccaccaacaccggcgcccaccatcgcgtcgcagcccctgtccctgcgcccagaggcgtgccggccagcggcggggggcgcagtgcacacgagggggctggacttcgcctgtgacatctacatctgggcgcccttggccgggacttgtggggtccttctcctgtcactggttatcaccctttactgcaaacggggcagaaagaaactcctgtatatattcaaacaaccatttatgagaccagtacaaactactcaagaggaagatggctgtagctgccgatttccagaagaagaagaaggaggatgtgaactgagagtgaagttcagcaggagcgcagacgcccccgcgtaccagcagggccagaaccagctctataacgagctgaatctaggacgaagagaggagtacgatgttttggacaagagacgtggccgggaccctgagatggggggaaagccgagaaggaagaaccctcaggaaggcctgtacaatgaactgcagaaagataagatggcggaggcctacagtgagattgggatgaaaggcgagcgccggaggggcaaggggcacgatggcctttaccagggtctcagtacagccaccaaggacacctacgacgcccttcacatgcaggccctgccccctcgctaa

SEQ ID NO: 8523 - DNA, 1488 bp, synthetic construct
  source 1..1488: mol_type = other DNA
atggccttaccagtgaccgccttgctcctgccgctggccttgctgctccacgccgccaggccgttcagcgaggaccgctaccgcggaggcagcggagacatccagatgacacagagccctagcagcctgtctgccagcgtgggagacagagtgaccatcacatgcaaggccagccaggatgtgggcacagccgtggattggtatcagcagaagcctggcaaggcccctaagctgctgatctactgggccagcacaagacacacaggcgtgcccagcagattttctggcagcggctctggcaccgacttcaccctgacaatatccagcctccagcctgaggacttcgccacctactactgccagcagtacaacagctaccctctgaccttcggccagggcaccaaggtggaaatcaaaagaggcggaggcggatctggcggcggaggtagcggtggcggaggatctgaagtgcagctggttgaatcaggtggcggcctggttcaacctggcggatctctgagactgagctgtgccgccagcggctacacctttaccgagtacacaatccactgggtccgacaggcccctggcaaaggacttgagtgggtcgccaacatcaaccccaacaatggcggcaccacctacaaccagaagttcgaggacagattcaccatcagccgggacaacagcaagaacaccctgtacctccagatgaactccctgagagccgaggacaccgccgtgtactattgtgccagaggctggaacttcgactactggggccagggaacactggtcaccgttagctctacgcgtaccacgacgccagcgccgcgaccaccaacaccggcgcccaccatcgcgtcgcagcccctgtccctgcgcccagaggcgtgccggccagcggcggggggcgcagtgcacacgagggggctggacttcgcctgtgacatctacatctgggcgcccttggccgggacttgtggggtccttctcctgtcactggttatcaccctttactgcaaacggggcagaaagaaactcctgtatatattcaaacaaccatttatgagaccagtacaaactactcaagaggaagatggctgtagctgccgatttccagaagaagaagaaggaggatgtgaactgagagtgaagttcagcaggagcgcagacgcccccgcgtaccagcagggccagaaccagctctataacgagctgaatctaggacgaagagaggagtacgatgttttggacaagagacgtggccgggaccctgagatggggggaaagccgagaaggaagaaccctcaggaaggcctgtacaatgaactgcagaaagataagatggcggaggcctacagtgagattgggatgaaaggcgagcgccggaggggcaaggggcacgatggcctttaccagggtctcagtacagccaccaaggacacctacgacgcccttcacatgcaggccctgccccctcgctaa

SEQ ID NO: 8524 - DNA, 1488 bp, synthetic construct
  source 1..1488: mol_type = other DNA
atggccttaccagtgaccgccttgctcctgccgctggccttgctgctccacgccgccaggccgcgcagcgaggaccgcttccgcggaggcagcggagacatccagatgacacagagccctagcagcctgtctgccagcgtgggagacagagtgaccatcacatgcaaggccagccaggatgtgggcacagccgtggattggtatcagcagaagcctggcaaggcccctaagctgctgatctactgggccagcacaagacacacaggcgtgcccagcagattttctggcagcggctctggcaccgacttcaccctgacaatatccagcctccagcctgaggacttcgccacctactactgccagcagtacaacagctaccctctgaccttcggccagggcaccaaggtggaaatcaaaagaggcggaggcggatctggcggcggaggtagcggtggcggaggatctgaagtgcagctggttgaatcaggtggcggcctggttcaacctggcggatctctgagactgagctgtgccgccagcggctacacctttaccgagtacacaatccactgggtccgacaggcccctggcaaaggacttgagtgggtcgccaacatcaaccccaacaatggcggcaccacctacaaccagaagttcgaggacagattcaccatcagccgggacaacagcaagaacaccctgtacctccagatgaactccctgagagccgaggacaccgccgtgtactattgtgccagaggctggaacttcgactactggggccagggaacactggtcaccgttagctctacgcgtaccacgacgccagcgccgcgaccaccaacaccggcgcccaccatcgcgtcgcagcccctgtccctgcgcccagaggcgtgccggccagcggcggggggcgcagtgcacacgagggggctggacttcgcctgtgacatctacatctgggcgcccttggccgggacttgtggggtccttctcctgtcactggttatcaccctttactgcaaacggggcagaaagaaactcctgtatatattcaaacaaccatttatgagaccagtacaaactactcaagaggaagatggctgtagctgccgatttccagaagaagaagaaggaggatgtgaactgagagtgaagttcagcaggagcgcagacgcccccgcgtaccagcagggccagaaccagctctataacgagctgaatctaggacgaagagaggagtacgatgttttggacaagagacgtggccgggaccctgagatggggggaaagccgagaaggaagaaccctcaggaaggcctgtacaatgaactgcagaaagataagatggcggaggcctacagtgagattgggatgaaaggcgagcgccggaggggcaaggggcacgatggcctttaccagggtctcagtacagccaccaaggacacctacgacgcccttcacatgcaggccctgccccctcgctaa

SEQ ID NO: 8525 - DNA, 1488 bp, synthetic construct
  source 1..1488: mol_type = other DNA
atggccttaccagtgaccgccttgctcctgccgctggccttgctgctccacgccgccaggccgcgcagcgaggaccgccaccgcggaggcagcggagacatccagatgacacagagccctagcagcctgtctgccagcgtgggagacagagtgaccatcacatgcaaggccagccaggatgtgggcacagccgtggattggtatcagcagaagcctggcaaggcccctaagctgctgatctactgggccagcacaagacacacaggcgtgcccagcagattttctggcagcggctctggcaccgacttcaccctgacaatatccagcctccagcctgaggacttcgccacctactactgccagcagtacaacagctaccctctgaccttcggccagggcaccaaggtggaaatcaaaagaggcggaggcggatctggcggcggaggtagcggtggcggaggatctgaagtgcagctggttgaatcaggtggcggcctggttcaacctggcggatctctgagactgagctgtgccgccagcggctacacctttaccgagtacacaatccactgggtccgacaggcccctggcaaaggacttgagtgggtcgccaacatcaaccccaacaatggcggcaccacctacaaccagaagttcgaggacagattcaccatcagccgggacaacagcaagaacaccctgtacctccagatgaactccctgagagccgaggacaccgccgtgtactattgtgccagaggctggaacttcgactactggggccagggaacactggtcaccgttagctctacgcgtaccacgacgccagcgccgcgaccaccaacaccggcgcccaccatcgcgtcgcagcccctgtccctgcgcccagaggcgtgccggccagcggcggggggcgcagtgcacacgagggggctggacttcgcctgtgacatctacatctgggcgcccttggccgggacttgtggggtccttctcctgtcactggttatcaccctttactgcaaacggggcagaaagaaactcctgtatatattcaaacaaccatttatgagaccagtacaaactactcaagaggaagatggctgtagctgccgatttccagaagaagaagaaggaggatgtgaactgagagtgaagttcagcaggagcgcagacgcccccgcgtaccagcagggccagaaccagctctataacgagctgaatctaggacgaagagaggagtacgatgttttggacaagagacgtggccgggaccctgagatggggggaaagccgagaaggaagaaccctcaggaaggcctgtacaatgaactgcagaaagataagatggcggaggcctacagtgagattgggatgaaaggcgagcgccggaggggcaaggggcacgatggcctttaccagggtctcagtacagccaccaaggacacctacgacgcccttcacatgcaggccctgccccctcgctaa

SEQ ID NO: 8526 - DNA, 1491 bp, synthetic construct; identical to SEQ ID NO: 8418
  source 1..1491: mol_type = other DNA

SEQ ID NO: 8527 - DNA, 1491 bp, synthetic construct; identical to SEQ ID NO: 8435
  source 1..1491: mol_type = other DNA

SEQ ID NO: 8528 - DNA, 1491 bp, synthetic construct; identical to SEQ ID NO: 8436
  source 1..1491: mol_type = other DNA

SEQ ID NO: 8529 - DNA, 1491 bp, synthetic construct; identical to SEQ ID NO: 8437
  source 1..1491: mol_type = other DNA

SEQ ID NO: 8530 - DNA, 1491 bp, synthetic construct; identical to SEQ ID NO: 8438
  source 1..1491: mol_type = other DNA

SEQ ID NO: 8531 - DNA, 1491 bp, synthetic construct; identical to SEQ ID NO: 8439
  source 1..1491: mol_type = other DNA

SEQ ID NO: 8532 - DNA, 1491 bp, synthetic construct; identical to SEQ ID NO: 8440
  source 1..1491: mol_type = other DNA

SEQ ID NO: 8533 - DNA, 1491 bp, synthetic construct; identical to SEQ ID NO: 8441
  source 1..1491: mol_type = other DNA

SEQ ID NO: 8534 - DNA, 1491 bp, synthetic construct; identical to SEQ ID NO: 8442
  source 1..1491: mol_type = other DNA

SEQ ID NO: 8535 - DNA, 1491 bp, synthetic construct; identical to SEQ ID NO: 8443
  source 1..1491: mol_type = other DNA

SEQ ID NO: 8536 - DNA, 1491 bp, synthetic construct; identical to SEQ ID NO: 8444
  source 1..1491: mol_type = other DNA

SEQ ID NO: 8537 - DNA, 1491 bp, synthetic construct; identical to SEQ ID NO: 8445
  source 1..1491: mol_type = other DNA

SEQ ID NO: 8538 - DNA, 1491 bp, synthetic construct; identical to SEQ ID NO: 8448
  source 1..1491: mol_type = other DNA

SEQ ID NO: 8539 - DNA, 1491 bp, synthetic construct; identical to SEQ ID NO: 8449
  source 1..1491: mol_type = other DNA

SEQ ID NO: 8540 - DNA, 1491 bp, synthetic construct
  source 1..1491: mol_type = other DNA
atggccttaccagtgaccgccttgctcctgccgctggccttgctgctccacgccgccaggccggcccgcagcgagtggcgctaccgcggaggcagcggagacatccagatgacacagagccctagcagcctgtctgccagcgtgggagacagagtgaccatcacatgcaaggccagccaggatgtgggcacagccgtggattggtatcagcagaagcctggcaaggcccctaagctgctgatctactgggccagcacaagacacacaggcgtgcccagcagattttctggcagcggctctggcaccgacttcaccctgacaatatccagcctccagcctgaggacttcgccacctactactgccagcagtacaacagctaccctctgaccttcggccagggcaccaaggtggaaatcaaaagaggcggaggcggatctggcggcggaggtagcggtggcggaggatctgaagtgcagctggttgaatcaggtggcggcctggttcaacctggcggatctctgagactgagctgtgccgccagcggctacacctttaccgagtacacaatccactgggtccgacaggcccctggcaaaggacttgagtgggtcgccaacatcaaccccaacaatggcggcaccacctacaaccagaagttcgaggacagattcaccatcagccgggacaacagcaagaacaccctgtacctccagatgaactccctgagagccgaggacaccgccgtgtactattgtgccagaggctggaacttcgactactggggccagggaacactggtcaccgttagctctacgcgtaccacgacgccagcgccgcgaccaccaacaccggcgcccaccatcgcgtcgcagcccctgtccctgcgcccagaggcgtgccggccagcggcggggggcgcagtgcacacgagggggctggacttcgcctgtgacatctacatctgggcgcccttggccgggacttgtggggtccttctcctgtcactggttatcaccctttactgcaaacggggcagaaagaaactcctgtatatattcaaacaaccatttatgagaccagtacaaactactcaagaggaagatggctgtagctgccgatttccagaagaagaagaaggaggatgtgaactgagagtgaagttcagcaggagcgcagacgcccccgcgtaccagcagggccagaaccagctctataacgagctgaatctaggacgaagagaggagtacgatgttttggacaagagacgtggccgggaccctgagatggggggaaagccgagaaggaagaaccctcaggaaggcctgtacaatgaactgcagaaagataagatggcggaggcctacagtgagattgggatgaaaggcgagcgccggaggggcaaggggcacgatggcctttaccagggtctcagtacagccaccaaggacacctacgacgcccttcacatgcaggccctgccccctcgctaa

SEQ ID NO: 8541 - DNA, 1491 bp, synthetic construct
  source 1..1491: mol_type = other DNA
atggccttaccagtgaccgccttgctcctgccgctggccttgctgctccacgccgccaggccggcccgcagcgagtaccgctaccgcggaggcagcggagacatccagatgacacagagccctagcagcctgtctgccagcgtgggagacagagtgaccatcacatgcaaggccagccaggatgtgggcacagccgtggattggtatcagcagaagcctggcaaggcccctaagctgctgatctactgggccagcacaagacacacaggcgtgcccagcagattttctggcagcggctctggcaccgacttcaccctgacaatatccagcctccagcctgaggacttcgccacctactactgccagcagtacaacagctaccctctgaccttcggccagggcaccaaggtggaaatcaaaagaggcggaggcggatctggcggcggaggtagcggtggcggaggatctgaagtgcagctggttgaatcaggtggcggcctggttcaacctggcggatctctgagactgagctgtgccgccagcggctacacctttaccgagtacacaatccactgggtccgacaggcccctggcaaaggacttgagtgggtcgccaacatcaaccccaacaatggcggcaccacctacaaccagaagttcgaggacagattcaccatcagccgggacaacagcaagaacaccctgtacctccagatgaactccctgagagccgaggacaccgccgtgtactattgtgccagaggctggaacttcgactactggggccagggaacactggtcaccgttagctctacgcgtaccacgacgccagcgccgcgaccaccaacaccggcgcccaccatcgcgtcgcagcccctgtccctgcgcccagaggcgtgccggccagcggcggggggcgcagtgcacacgagggggctggacttcgcctgtgacatctacatctgggcgcccttggccgggacttgtggggtccttctcctgtcactggttatcaccctttactgcaaacggggcagaaagaaactcctgtatatattcaaacaaccatttatgagaccagtacaaactactcaagaggaagatggctgtagctgccgatttccagaagaagaagaaggaggatgtgaactgagagtgaagttcagcaggagcgcagacgcccccgcgtaccagcagggccagaaccagctctataacgagctgaatctaggacgaagagaggagtacgatgttttggacaagagacgtggccgggaccctgagatggggggaaagccgagaaggaagaaccctcaggaaggcctgtacaatgaactgcagaaagataagatggcggaggcctacagtgagattgggatgaaaggcgagcgccggaggggcaaggggcacgatggcctttaccagggtctcagtacagccaccaaggacacctacgacgcccttcacatgcaggccctgccccctcgctaa

SEQ ID NO: 8542 - DNA, 1491 bp, synthetic construct
  source 1..1491: mol_type = other DNA
atggccttaccagtgaccgccttgctcctgccgctggccttgctgctccacgccgccaggccggcccgcagcgagcgccgctaccgcggaggcagcggagacatccagatgacacagagccctagcagcctgtctgccagcgtgggagacagagtgaccatcacatgcaaggccagccaggatgtgggcacagccgtggattggtatcagcagaagcctggcaaggcccctaagctgctgatctactgggccagcacaagacacacaggcgtgcccagcagattttctggcagcggctctggcaccgacttcaccctgacaatatccagcctccagcctgaggacttcgccacctactactgccagcagtacaacagctaccctctgaccttcggccagggcaccaaggtggaaatcaaaagaggcggaggcggatctggcggcggaggtagcggtggcggaggatctgaagtgcagctggttgaatcaggtggcggcctggttcaacctggcggatctctgagactgagctgtgccgccagcggctacacctttaccgagtacacaatccactgggtccgacaggcccctggcaaaggacttgagtgggtcgccaacatcaaccccaacaatggcggcaccacctacaaccagaagttcgaggacagattcaccatcagccgggacaacagcaagaacaccctgtacctccagatgaactccctgagagccgaggacaccgccgtgtactattgtgccagaggctggaacttcgactactggggccagggaacactggtcaccgttagctctacgcgtaccacgacgccagcgccgcgaccaccaacaccggcgcccaccatcgcgtcgcagcccctgtccctgcgcccagaggcgtgccggccagcggcggggggcgcagtgcacacgagggggctggacttcgcctgtgacatctacatctgggcgcccttggccgggacttgtggggtccttctcctgtcactggttatcaccctttactgcaaacggggcagaaagaaactcctgtatatattcaaacaaccatttatgagaccagtacaaactactcaagaggaagatggctgtagctgccgatttccagaagaagaagaaggaggatgtgaactgagagtgaagttcagcaggagcgcagacgcccccgcgtaccagcagggccagaaccagctctataacgagctgaatctaggacgaagagaggagtacgatgttttggacaagagacgtggccgggaccctgagatggggggaaagccgagaaggaagaaccctcaggaaggcctgtacaatgaactgcagaaagataagatggcggaggcctacagtgagattgggatgaaaggcgagcgccggaggggcaaggggcacgatggcctttaccagggtctcagtacagccaccaaggacacctacgacgcccttcacatgcaggccctgccccctcgctaa

SEQ ID NO: 8543 - DNA, 1491 bp, synthetic construct
  source 1..1491: mol_type = other DNA
atggccttaccagtgaccgccttgctcctgccgctggccttgctgctccacgccgccaggccggcccgcagcgaggtgcgctaccgcggaggcagcggagacatccagatgacacagagccctagcagcctgtctgccagcgtgggagacagagtgaccatcacatgcaaggccagccaggatgtgggcacagccgtggattggtatcagcagaagcctggcaaggcccctaagctgctgatctactgggccagcacaagacacacaggcgtgcccagcagattttctggcagcggctctggcaccgacttcaccctgacaatatccagcctccagcctgaggacttcgccacctactactgccagcagtacaacagctaccctctgaccttcggccagggcaccaaggtggaaatcaaaagaggcggaggcggatctggcggcggaggtagcggtggcggaggatctgaagtgcagctggttgaatcaggtggcggcctggttcaacctggcggatctctgagactgagctgtgccgccagcggctacacctttaccgagtacacaatccactgggtccgacaggcccctggcaaaggacttgagtgggtcgccaacatcaaccccaacaatggcggcaccacctacaaccagaagttcgaggacagattcaccatcagccgggacaacagcaagaacaccctgtacctccagatgaactccctgagagccgaggacaccgccgtgtactattgtgccagaggctggaacttcgactactggggccagggaacactggtcaccgttagctctacgcgtaccacgacgccagcgccgcgaccaccaacaccggcgcccaccatcgcgtcgcagcccctgtccctgcgcccagaggcgtgccggccagcggcggggggcgcagtgcacacgagggggctggacttcgcctgtgacatctacatctgggcgcccttggccgggacttgtggggtccttctcctgtcactggttatcaccctttactgcaaacggggcagaaagaaactcctgtatatattcaaacaaccatttatgagaccagtacaaactactcaagaggaagatggctgtagctgccgatttccagaagaagaagaaggaggatgtgaactgagagtgaagttcagcaggagcgcagacgcccccgcgtaccagcagggccagaaccagctctataacgagctgaatctaggacgaagagaggagtacgatgttttggacaagagacgtggccgggaccctgagatggggggaaagccgagaaggaagaaccctcaggaaggcctgtacaatgaactgcagaaagataagatggcggaggcctacagtgagattgggatgaaaggcgagcgccggaggggcaaggggcacgatggcctttaccagggtctcagtacagccaccaaggacacctacgacgcccttcacatgcaggccctgccccctcgctaa

SEQ ID NO: 8544 - DNA, 1491 bp, synthetic construct
  source 1..1491: mol_type = other DNA
atggccttaccagtgaccgccttgctcctgccgctggccttgctgctccacgccgccaggccggcccgcatcgaggaccgctaccgcggaggcagcggagacatccagatgacacagagccctagcagcctgtctgccagcgtgggagacagagtgaccatcacatgcaaggccagccaggatgtgggcacagccgtggattggtatcagcagaagcctggcaaggcccctaagctgctgatctactgggccagcacaagacacacaggcgtgcccagcagattttctggcagcggctctggcaccgacttcaccctgacaatatccagcctccagcctgaggacttcgccacctactactgccagcagtacaacagctaccctctgaccttcggccagggcaccaaggtggaaatcaaaagaggcggaggcggatctggcggcggaggtagcggtggcggaggatctgaagtgcagctggttgaatcaggtggcggcctggttcaacctggcggatctctgagactgagctgtgccgccagcggctacacctttaccgagtacacaatccactgggtccgacaggcccctggcaaaggacttgagtgggtcgccaacatcaaccccaacaatggcggcaccacctacaaccagaagttcgaggacagattcaccatcagccgggacaacagcaagaacaccctgtacctccagatgaactccctgagagccgaggacaccgccgtgtactattgtgccagaggctggaacttcgactactggggccagggaacactggtcaccgttagctctacgcgtaccacgacgccagcgccgcgaccaccaacaccggcgcccaccatcgcgtcgcagcccctgtccctgcgcccagaggcgtgccggccagcggcggggggcgcagtgcacacgagggggctggacttcgcctgtgacatctacatctgggcgcccttggccgggacttgtggggtccttctcctgtcactggttatcaccctttactgcaaacggggcagaaagaaactcctgtatatattcaaacaaccatttatgagaccagtacaaactactcaagaggaagatggctgtagctgccgatttccagaagaagaagaaggaggatgtgaactgagagtgaagttcagcaggagcgcagacgcccccgcgtaccagcagggccagaaccagctctataacgagctgaatctaggacgaagagaggagtacgatgttttggacaagagacgtggccgggaccctgagatggggggaaagccgagaaggaagaaccctcaggaaggcctgtacaatgaactgcagaaagataagatggcggaggcctacagtgagattgggatgaaaggcgagcgccggaggggcaaggggcacgatggcctttaccagggtctcagtacagccaccaaggacacctacgacgcccttcacatgcaggccctgccccctcgctaa

SEQ ID NO: 8545 - DNA, 1491 bp, synthetic construct
  source 1..1491: mol_type = other DNA
atggccttaccagtgaccgccttgctcctgccgctggccttgctgctccacgccgccaggccggcccgcctggaggaccgctaccgcggaggcagcggagacatccagatgacacagagccctagcagcctgtctgccagcgtgggagacagagtgaccatcacatgcaaggccagccaggatgtgggcacagccgtggattggtatcagcagaagcctggcaaggcccctaagctgctgatctactgggccagcacaagacacacaggcgtgcccagcagattttctggcagcggctctggcaccgacttcaccctgacaatatccagcctccagcctgaggacttcgccacctactactgccagcagtacaacagctaccctctgaccttcggccagggcaccaaggtggaaatcaaaagaggcggaggcggatctggcggcggaggtagcggtggcggaggatctgaagtgcagctggttgaatcaggtggcggcctggttcaacctggcggatctctgagactgagctgtgccgccagcggctacacctttaccgagtacacaatccactgggtccgacaggcccctggcaaaggacttgagtgggtcgccaacatcaaccccaacaatggcggcaccacctacaaccagaagttcgaggacagattcaccatcagccgggacaacagcaagaacaccctgtacctccagatgaactccctgagagccgaggacaccgccgtgtactattgtgccagaggctggaacttcgactactggggccagggaacactggtcaccgttagctctacgcgtaccacgacgccagcgccgcgaccaccaacaccggcgcccaccatcgcgtcgcagcccctgtccctgcgcccagaggcgtgccggccagcggcggggggcgcagtgcacacgagggggctggacttcgcctgtgacatctacatctgggcgcccttggccgggacttgtggggtccttctcctgtcactggttatcaccctttactgcaaacggggcagaaagaaactcctgtatatattcaaacaaccatttatgagaccagtacaaactactcaagaggaagatggctgtagctgccgatttccagaagaagaagaaggaggatgtgaactgagagtgaagttcagcaggagcgcagacgcccccgcgtaccagcagggccagaaccagctctataacgagctgaatctaggacgaagagaggagtacgatgttttggacaagagacgtggccgggaccctgagatggggggaaagccgagaaggaagaaccctcaggaaggcctgtacaatgaactgcagaaagataagatggcggaggcctacagtgagattgggatgaaaggcgagcgccggaggggcaaggggcacgatggcctttaccagggtctcagtacagccaccaaggacacctacgacgcccttcacatgcaggccctgccccctcgctaa

SEQ ID NO: 8546 - DNA, 1491 bp, synthetic construct
  source 1..1491: mol_type = other DNA
atggccttaccagtgaccgccttgctcctgccgctggccttgctgctccacgccgccaggccggcccgcatggaggaccgctaccgcggaggcagcggagacatccagatgacacagagccctagcagcctgtctgccagcgtgggagacagagtgaccatcacatgcaaggccagccaggatgtgggcacagccgtggattggtatcagcagaagcctggcaaggcccctaagctgctgatctactgggccagcacaagacacacaggcgtgcccagcagattttctggcagcggctctggcaccgacttcaccctgacaatatccagcctccagcctgaggacttcgccacctactactgccagcagtacaacagctaccctctgaccttcggccagggcaccaaggtggaaatcaaaagaggcggaggcggatctggcggcggaggtagcggtggcggaggatctgaagtgcagctggttgaatcaggtggcggcctggttcaacctggcggatctctgagactgagctgtgccgccagcggctacacctttaccgagtacacaatccactgggtccgacaggcccctggcaaaggacttgagtgggtcgccaacatcaaccccaacaatggcggcaccacctacaaccagaagttcgaggacagattcaccatcagccgggacaacagcaagaacaccctgtacctccagatgaactccctgagagccgaggacaccgccgtgtactattgtgccagaggctggaacttcgactactggggccagggaacactggtcaccgttagctctacgcgtaccacgacgccagcgccgcgaccaccaacaccggcgcccaccatcgcgtcgcagcccctgtccctgcgcccagaggcgtgccggccagcggcggggggcgcagtgcacacgagggggctggacttcgcctgtgacatctacatctgggcgcccttggccgggacttgtggggtccttctcctgtcactggttatcaccctttactgcaaacggggcagaaagaaactcctgtatatattcaaacaaccatttatgagaccagtacaaactactcaagaggaagatggctgtagctgccgatttccagaagaagaagaaggaggatgtgaactgagagtgaagttcagcaggagcgcagacgcccccgcgtaccagcagggccagaaccagctctataacgagctgaatctaggacgaagagaggagtacgatgttttggacaagagacgtggccgggaccctgagatggggggaaagccgagaaggaagaaccctcaggaaggcctgtacaatgaactgcagaaagataagatggcggaggcctacagtgagattgggatgaaaggcgagcgccggaggggcaaggggcacgatggcctttaccagggtctcagtacagccaccaaggacacctacgacgcccttcacatgcaggccctgccccctcgctaa

SEQ ID NO: 8547 - DNA, 1491 bp, synthetic construct
  source 1..1491: mol_type = other DNA
atggccttaccagtgaccgccttgctcctgccgctggccttgctgctccacgccgccaggccggcccgcgtggaggaccgctaccgcggaggcagcggagacatccagatgacacagagccctagcagcctgtctgccagcgtgggagacagagtgaccatcacatgcaaggccagccaggatgtgggcacagccgtggattggtatcagcagaagcctggcaaggcccctaagctgctgatctactgggccagcacaagacacacaggcgtgcccagcagattttctggcagcggctctggcaccgacttcaccctgacaatatccagcctccagcctgaggacttcgccacctactactgccagcagtacaacagctaccctctgaccttcggccagggcaccaaggtggaaatcaaaagaggcggaggcggatctggcggcggaggtagcggtggcggaggatctgaagtgcagctggttgaatcaggtggcggcctggttcaacctggcggatctctgagactgagctgtgccgccagcggctacacctttaccgagtacacaatccactgggtccgacaggcccctggcaaaggacttgagtgggtcgccaacatcaaccccaacaatggcggcaccacctacaaccagaagttcgaggacagattcaccatcagccgggacaacagcaagaacaccctgtacctccagatgaactccctgagagccgaggacaccgccgtgtactattgtgccagaggctggaacttcgactactggggccagggaacactggtcaccgttagctctacgcgtaccacgacgccagcgccgcgaccaccaacaccggcgcccaccatcgcgtcgcagcccctgtccctgcgcccagaggcgtgccggccagcggcggggggcgcagtgcacacgagggggctggacttcgcctgtgacatctacatctgggcgcccttggccgggacttgtggggtccttctcctgtcactggttatcaccctttactgcaaacggggcagaaagaaactcctgtatatattcaaacaaccatttatgagaccagtacaaactactcaagaggaagatggctgtagctgccgatttccagaagaagaagaaggaggatgtgaactgagagtgaagttcagcaggagcgcagacgcccccgcgtaccagcagggccagaaccagctctataacgagctgaatctaggacgaagagaggagtacgatgttttggacaagagacgtggccgggaccctgagatggggggaaagccgagaaggaagaaccctcaggaaggcctgtacaatgaactgcagaaagataagatggcggaggcctacagtgagattgggatgaaaggcgagcgccggaggggcaaggggcacgatggcctttaccagggtctcagtacagccaccaaggacacctacgacgcccttcacatgcaggccctgccccctcgctaa

SEQ ID NO: 8548 - DNA, 1491 bp, synthetic construct
  source 1..1491: mol_type = other DNA
atggccttaccagtgaccgccttgctcctgccgctggccttgctgctccacgccgccaggccggcccgcgccgaggaccgctaccgcggaggcagcggagacatccagatgacacagagccctagcagcctgtctgccagcgtgggagacagagtgaccatcacatgcaaggccagccaggatgtgggcacagccgtggattggtatcagcagaagcctggcaaggcccctaagctgctgatctactgggccagcacaagacacacaggcgtgcccagcagattttctggcagcggctctggcaccgacttcaccctgacaatatccagcctccagcctgaggacttcgccacctactactgccagcagtacaacagctaccctctgaccttcggccagggcaccaaggtggaaatcaaaagaggcggaggcggatctggcggcggaggtagcggtggcggaggatctgaagtgcagctggttgaatcaggtggcggcctggttcaacctggcggatctctgagactgagctgtgccgccagcggctacacctttaccgagtacacaatccactgggtccgacaggcccctggcaaaggacttgagtgggtcgccaacatcaaccccaacaatggcggcaccacctacaaccagaagttcgaggacagattcaccatcagccgggacaacagcaagaacaccctgtacctccagatgaactccctgagagccgaggacaccgccgtgtactattgtgccagaggctggaacttcgactactggggccagggaacactggtcaccgttagctctacgcgtaccacgacgccagcgccgcgaccaccaacaccggcgcccaccatcgcgtcgcagcccctgtccctgcgcccagaggcgtgccggccagcggcggggggcgcagtgcacacgagggggctggacttcgcctgtgacatctacatctgggcgcccttggccgggacttgtggggtccttctcctgtcactggttatcaccctttactgcaaacggggcagaaagaaactcctgtatatattcaaacaaccatttatgagaccagtacaaactactcaagaggaagatggctgtagctgccgatttccagaagaagaagaaggaggatgtgaactgagagtgaagttcagcaggagcgcagacgcccccgcgtaccagcagggccagaaccagctctataacgagctgaatctaggacgaagagaggagtacgatgttttggacaagagacgtggccgggaccctgagatggggggaaagccgagaaggaagaaccctcaggaaggcctgtacaatgaactgcagaaagataagatggcggaggcctacagtgagattgggatgaaaggcgagcgccggaggggcaaggggcacgatggcctttaccagggtctcagtacagccaccaaggacacctacgacgcccttcacatgcaggccctgccccctcgctaa

SEQ ID NO: 8549 - DNA, 1491 bp, synthetic construct
  source 1..1491: mol_type = other DNA
atggccttaccagtgaccgccttgctcctgccgctggccttgctgctccacgccgccaggccggcccgcttcgaggaccgctaccgcggaggcagcggagacatccagatgacacagagccctagcagcctgtctgccagcgtgggagacagagtgaccatcacatgcaaggccagccaggatgtgggcacagccgtggattggtatcagcagaagcctggcaaggcccctaagctgctgatctactgggccagcacaagacacacaggcgtgcccagcagattttctggcagcggctctggcaccgacttcaccctgacaatatccagcctccagcctgaggacttcgccacctactactgccagcagtacaacagctaccctctgaccttcggccagggcaccaaggtggaaatcaaaagaggcggaggcggatctggcggcggaggtagcggtggcggaggatctgaagtgcagctggttgaatcaggtggcggcctggttcaacctggcggatctctgagactgagctgtgccgccagcggctacacctttaccgagtacacaatccactgggtccgacaggcccctggcaaaggacttgagtgggtcgccaacatcaaccccaacaatggcggcaccacctacaaccagaagttcgaggacagattcaccatcagccgggacaacagcaagaacaccctgtacctccagatgaactccctgagagccgaggacaccgccgtgtactattgtgccagaggctggaacttcgactactggggccagggaacactggtcaccgttagctctacgcgtaccacgacgccagcgccgcgaccaccaacaccggcgcccaccatcgcgtcgcagcccctgtccctgcgcccagaggcgtgccggccagcggcggggggcgcagtgcacacgagggggctggacttcgcctgtgacatctacatctgggcgcccttggccgggacttgtggggtccttctcctgtcactggttatcaccctttactgcaaacggggcagaaagaaactcctgtatatattcaaacaaccatttatgagaccagtacaaactactcaagaggaagatggctgtagctgccgatttccagaagaagaagaaggaggatgtgaactgagagtgaagttcagcaggagcgcagacgcccccgcgtaccagcagggccagaaccagctctataacgagctgaatctaggacgaagagaggagtacgatgttttggacaagagacgtggccgggaccctgagatggggggaaagccgagaaggaagaaccctcaggaaggcctgtacaatgaactgcagaaagataagatggcggaggcctacagtgagattgggatgaaaggcgagcgccggaggggcaaggggcacgatggcctttaccagggtctcagtacagccaccaaggacacctacgacgcccttcacatgcaggccctgccccctcgctaa

SEQ ID NO: 8550 - DNA, 1491 bp, synthetic construct
  source 1..1491: mol_type = other DNA
atggccttaccagtgaccgccttgctcctgccgctggccttgctgctccacgccgccaggccggcccgccacgaggaccgctaccgcggaggcagcggagacatccagatgacacagagccctagcagcctgtctgccagcgtgggagacagagtgaccatcacatgcaaggccagccaggatgtgggcacagccgtggattggtatcagcagaagcctggcaaggcccctaagctgctgatctactgggccagcacaagacacacaggcgtgcccagcagattttctggcagcggctctggcaccgacttcaccctgacaatatccagcctccagcctgaggacttcgccacctactactgccagcagtacaacagctaccctctgaccttcggccagggcaccaaggtggaaatcaaaagaggcggaggcggatctggcggcggaggtagcggtggcggaggatctgaagtgcagctggttgaatcaggtggcggcctggttcaacctggcggatctctgagactgagctgtgccgccagcggctacacctttaccgagtacacaatccactgggtccgacaggcccctggcaaaggacttgagtgggtcgccaacatcaaccccaacaatggcggcaccacctacaaccagaagttcgaggacagattcaccatcagccgggacaacagcaagaacaccctgtacctccagatgaactccctgagagccgaggacaccgccgtgtactattgtgccagaggctggaacttcgactactggggccagggaacactggtcaccgttagctctacgcgtaccacgacgccagcgccgcgaccaccaacaccggcgcccaccatcgcgtcgcagcccctgtccctgcgcccagaggcgtgccggccagcggcggggggcgcagtgcacacgagggggctggacttcgcctgtgacatctacatctgggcgcccttggccgggacttgtggggtccttctcctgtcactggttatcaccctttactgcaaacggggcagaaagaaactcctgtatatattcaaacaaccatttatgagaccagtacaaactactcaagaggaagatggctgtagctgccgatttccagaagaagaagaaggaggatgtgaactgagagtgaagttcagcaggagcgcagacgcccccgcgtaccagcagggccagaaccagctctataacgagctgaatctaggacgaagagaggagtacgatgttttggacaagagacgtggccgggaccctgagatggggggaaagccgagaaggaagaaccctcaggaaggcctgtacaatgaactgcagaaagataagatggcggaggcctacagtgagattgggatgaaaggcgagcgccggaggggcaaggggcacgatggcctttaccagggtctcagtacagccaccaaggacacctacgacgcccttcacatgcaggccctgccccctcgctaa

SEQ ID NO: 8551 - DNA, 1491 bp, synthetic construct
  source 1..1491: mol_type = other DNA
atggccttaccagtgaccgccttgctcctgccgctggccttgctgctccacgccgccaggccggcccgcggcgaggaccgctaccgcggaggcagcggagacatccagatgacacagagccctagcagcctgtctgccagcgtgggagacagagtgaccatcacatgcaaggccagccaggatgtgggcacagccgtggattggtatcagcagaagcctggcaaggcccctaagctgctgatctactgggccagcacaagacacacaggcgtgcccagcagattttctggcagcggctctggcaccgacttcaccctgacaatatccagcctccagcctgaggacttcgccacctactactgccagcagtacaacagctaccctctgaccttcggccagggcaccaaggtggaaatcaaaagaggcggaggcggatctggcggcggaggtagcggtggcggaggatctgaagtgcagctggttgaatcaggtggcggcctggttcaacctggcggatctctgagactgagctgtgccgccagcggctacacctttaccgagtacacaatccactgggtccgacaggcccctggcaaaggacttgagtgggtcgccaacatcaaccccaacaatggcggcaccacctacaaccagaagttcgaggacagattcaccatcagccgggacaacagcaagaacaccctgtacctccagatgaactccctgagagccgaggacaccgccgtgtactattgtgccagaggctggaacttcgactactggggccagggaacactggtcaccgttagctctacgcgtaccacgacgccagcgccgcgaccaccaacaccggcgcccaccatcgcgtcgcagcccctgtccctgcgcccagaggcgtgccggccagcggcggggggcgcagtgcacacgagggggctggacttcgcctgtgacatctacatctgggcgcccttggccgggacttgtggggtccttctcctgtcactggttatcaccctttactgcaaacggggcagaaagaaactcctgtatatattcaaacaaccatttatgagaccagtacaaactactcaagaggaagatggctgtagctgccgatttccagaagaagaagaaggaggatgtgaactgagagtgaagttcagcaggagcgcagacgcccccgcgtaccagcagggccagaaccagctctataacgagctgaatctaggacgaagagaggagtacgatgttttggacaagagacgtggccgggaccctgagatggggggaaagccgagaaggaagaaccctcaggaaggcctgtacaatgaactgcagaaagataagatggcggaggcctacagtgagattgggatgaaaggcgagcgccggaggggcaaggggcacgatggcctttaccagggtctcagtacagccaccaaggacacctacgacgcccttcacatgcaggccctgccccctcgctaa

SEQ ID NO: 8552 - DNA, 1491 bp, synthetic construct
  source 1..1491: mol_type = other DNA
atggccttaccagtgaccgccttgctcctgccgctggccttgctgctccacgccgccaggccggcccgcaccgaggaccgctaccgcggaggcagcggagacatccagatgacacagagccctagcagcctgtctgccagcgtgggagacagagtgaccatcacatgcaaggccagccaggatgtgggcacagccgtggattggtatcagcagaagcctggcaaggcccctaagctgctgatctactgggccagcacaagacacacaggcgtgcccagcagattttctggcagcggctctggcaccgacttcaccctgacaatatccagcctccagcctgaggacttcgccacctactactgccagcagtacaacagctaccctctgaccttcggccagggcaccaaggtggaaatcaaaagaggcggaggcggatctggcggcggaggtagcggtggcggaggatctgaagtgcagctggttgaatcaggtggcggcctggttcaacctggcggatctctgagactgagctgtgccgccagcggctacacctttaccgagtacacaatccactgggtccgacaggcccctggcaaaggacttgagtgggtcgccaacatcaaccccaacaatggcggcaccacctacaaccagaagttcgaggacagattcaccatcagccgggacaacagcaagaacaccctgtacctccagatgaactccctgagagccgaggacaccgccgtgtactattgtgccagaggctggaacttcgactactggggccagggaacactggtcaccgttagctctacgcgtaccacgacgccagcgccgcgaccaccaacaccggcgcccaccatcgcgtcgcagcccctgtccctgcgcccagaggcgtgccggccagcggcggggggcgcagtgcacacgagggggctggacttcgcctgtgacatctacatctgggcgcccttggccgggacttgtggggtccttctcctgtcactggttatcaccctttactgcaaacggggcagaaagaaactcctgtatatattcaaacaaccatttatgagaccagtacaaactactcaagaggaagatggctgtagctgccgatttccagaagaagaagaaggaggatgtgaactgagagtgaagttcagcaggagcgcagacgcccccgcgtaccagcagggccagaaccagctctataacgagctgaatctaggacgaagagaggagtacgatgttttggacaagagacgtggccgggaccctgagatggggggaaagccgagaaggaagaaccctcaggaaggcctgtacaatgaactgcagaaagataagatggcggaggcctacagtgagattgggatgaaaggcgagcgccggaggggcaaggggcacgatggcctttaccagggtctcagtacagccaccaaggacacctacgacgcccttcacatgcaggccctgccccctcgctaa

SEQ ID NO: 8553 - DNA, 1491 bp, synthetic construct
  source 1..1491: mol_type = other DNA
atggccttaccagtgaccgccttgctcctgccgctggccttgctgctccacgccgccaggccggccagcagcgaggaccgctaccgcggaggcagcggagacatccagatgacacagagccctagcagcctgtctgccagcgtgggagacagagtgaccatcacatgcaaggccagccaggatgtgggcacagccgtggattggtatcagcagaagcctggcaaggcccctaagctgctgatctactgggccagcacaagacacacaggcgtgcccagcagattttctggcagcggctctggcaccgacttcaccctgacaatatccagcctccagcctgaggacttcgccacctactactgccagcagtacaacagctaccctctgaccttcggccagggcaccaaggtggaaatcaaaagaggcggaggcggatctggcggcggaggtagcggtggcggaggatctgaagtgcagctggttgaatcaggtggcggcctggttcaacctggcggatctctgagactgagctgtgccgccagcggctacacctttaccgagtacacaatccactgggtccgacaggcccctggcaaaggacttgagtgggtcgccaacatcaaccccaacaatggcggcaccacctacaaccagaagttcgaggacagattcaccatcagccgggacaacagcaagaacaccctgtacctccagatgaactccctgagagccgaggacaccgccgtgtactattgtgccagaggctggaacttcgactactggggccagggaacactggtcaccgttagctctacgcgtaccacgacgccagcgccgcgaccaccaacaccggcgcccaccatcgcgtcgcagcccctgtccctgcgcccagaggcgtgccggccagcggcggggggcgcagtgcacacgagggggctggacttcgcctgtgacatctacatctgggcgcccttggccgggacttgtggggtccttctcctgtcactggttatcaccctttactgcaaacggggcagaaagaaactcctgtatatattcaaacaaccatttatgagaccagtacaaactactcaagaggaagatggctgtagctgccgatttccagaagaagaagaaggaggatgtgaactgagagtgaagttcagcaggagcgcagacgcccccgcgtaccagcagggccagaaccagctctataacgagctgaatctaggacgaagagaggagtacgatgttttggacaagagacgtggccgggaccctgagatggggggaaagccgagaaggaagaaccctcaggaaggcctgtacaatgaactgcagaaagataagatggcggaggcctacagtgagattgggatgaaaggcgagcgccggaggggcaaggggcacgatggcctttaccagggtctcagtacagccaccaaggacacctacgacgcccttcacatgcaggccctgccccctcgctaa

SEQ ID NO: 8554 - DNA, 1491 bp, synthetic construct
  source 1..1491: mol_type = other DNA
atggccttaccagtgaccgccttgctcctgccgctggccttgctgctccacgccgccaggccggcccacagcgaggaccgctaccgcggaggcagcggagacatccagatgacacagagccctagcagcctgtctgccagcgtgggagacagagtgaccatcacatgcaaggccagccaggatgtgggcacagccgtggattggtatcagcagaagcctggcaaggcccctaagctgctgatctactgggccagcacaagacacacaggcgtgcccagcagattttctggcagcggctctggcaccgacttcaccctgacaatatccagcctccagcctgaggacttcgccacctactactgccagcagtacaacagctaccctctgaccttcggccagggcaccaaggtggaaatcaaaagaggcggaggcggatctggcggcggaggtagcggtggcggaggatctgaagtgcagctggttgaatcaggtggcggcctggttcaacctggcggatctctgagactgagctgtgccgccagcggctacacctttaccgagtacacaatccactgggtccgacaggcccctggcaaaggacttgagtgggtcgccaacatcaaccccaacaatggcggcaccacctacaaccagaagttcgaggacagattcaccatcagccgggacaacagcaagaacaccctgtacctccagatgaactccctgagagccgaggacaccgccgtgtactattgtgccagaggctggaacttcgactactggggccagggaacactggtcaccgttagctctacgcgtaccacgacgccagcgccgcgaccaccaacaccggcgcccaccatcgcgtcgcagcccctgtccctgcgcccagaggcgtgccggccagcggcggggggcgcagtgcacacgagggggctggacttcgcctgtgacatctacatctgggcgcccttggccgggacttgtggggtccttctcctgtcactggttatcaccctttactgcaaacggggcagaaagaaactcctgtatatattcaaacaaccatttatgagaccagtacaaactactcaagaggaagatggctgtagctgccgatttccagaagaagaagaaggaggatgtgaactgagagtgaagttcagcaggagcgcagacgcccccgcgtaccagcagggccagaaccagctctataacgagctgaatctaggacgaagagaggagtacgatgttttggacaagagacgtggccgggaccctgagatggggggaaagccgagaaggaagaaccctcaggaaggcctgtacaatgaactgcagaaagataagatggcggaggcctacagtgagattgggatgaaaggcgagcgccggaggggcaaggggcacgatggcctttaccagggtctcagtacagccaccaaggacacctacgacgcccttcacatgcaggccctgccccctcgctaa

SEQ ID NO: 8555 - DNA, 1491 bp, synthetic construct
  source 1..1491: mol_type = other DNA
atggccttaccagtgaccgccttgctcctgccgctggccttgctgctccacgccgccaggccggccgacagcgaggaccgctaccgcggaggcagcggagacatccagatgacacagagccctagcagcctgtctgccagcgtgggagacagagtgaccatcacatgcaaggccagccaggatgtgggcacagccgtggattggtatcagcagaagcctggcaaggcccctaagctgctgatctactgggccagcacaagacacacaggcgtgcccagcagattttctggcagcggctctggcaccgacttcaccctgacaatatccagcctccagcctgaggacttcgccacctactactgccagcagtacaacagctaccctctgaccttcggccagggcaccaaggtggaaatcaaaagaggcggaggcggatctggcggcggaggtagcggtggcggaggatctgaagtgcagctggttgaatcaggtggcggcctggttcaacctggcggatctctgagactgagctgtgccgccagcggctacacctttaccgagtacacaatccactgggtccgacaggcccctggcaaaggacttgagtgggtcgccaacatcaaccccaacaatggcggcaccacctacaaccagaagttcgaggacagattcaccatcagccgggacaacagcaagaacaccctgtacctccagatgaactccctgagagccgaggacaccgccgtgtactattgtgccagaggctggaacttcgactactggggccagggaacactggtcaccgttagctctacgcgtaccacgacgccagcgccgcgaccaccaacaccggcgcccaccatcgcgtcgcagcccctgtccctgcgcccagaggcgtgccggccagcggcggggggcgcagtgcacacgagggggctggacttcgcctgtgacatctacatctgggcgcccttggccgggacttgtggggtccttctcctgtcactggttatcaccctttactgcaaacggggcagaaagaaactcctgtatatattcaaacaaccatttatgagaccagtacaaactactcaagaggaagatggctgtagctgccgatttccagaagaagaagaaggaggatgtgaactgagagtgaagttcagcaggagcgcagacgcccccgcgtaccagcagggccagaaccagctctataacgagctgaatctaggacgaagagaggagtacgatgttttggacaagagacgtggccgggaccctgagatggggggaaagccgagaaggaagaaccctcaggaaggcctgtacaatgaactgcagaaagataagatggcggaggcctacagtgagattgggatgaaaggcgagcgccggaggggcaaggggcacgatggcctttaccagggtctcagtacagccaccaaggacacctacgacgcccttcacatgcaggccctgccccctcgctaa

SEQ ID NO: 8556 - DNA, 1491 bp, synthetic construct
  source 1..1491: mol_type = other DNA
atggccttaccagtgaccgccttgctcctgccgctggccttgctgctccacgccgccaggccggccttcagcgaggaccgctaccgcggaggcagcggagacatccagatgacacagagccctagcagcctgtctgccagcgtgggagacagagtgaccatcacatgcaaggccagccaggatgtgggcacagccgtggattggtatcagcagaagcctggcaaggcccctaagctgctgatctactgggccagcacaagacacacaggcgtgcccagcagattttctggcagcggctctggcaccgacttcaccctgacaatatccagcctccagcctgaggacttcgccacctactactgccagcagtacaacagctaccctctgaccttcggccagggcaccaaggtggaaatcaaaagaggcggaggcggatctggcggcggaggtagcggtggcggaggatctgaagtgcagctggttgaatcaggtggcggcctggttcaacctggcggatctctgagactgagctgtgccgccagcggctacacctttaccgagtacacaatccactgggtccgacaggcccctggcaaaggacttgagtgggtcgccaacatcaaccccaacaatggcggcaccacctacaaccagaagttcgaggacagattcaccatcagccgggacaacagcaagaacaccctgtacctccagatgaactccctgagagccgaggacaccgccgtgtactattgtgccagaggctggaacttcgactactggggccagggaacactggtcaccgttagctctacgcgtaccacgacgccagcgccgcgaccaccaacaccggcgcccaccatcgcgtcgcagcccctgtccctgcgcccagaggcgtgccggccagcggcggggggcgcagtgcacacgagggggctggacttcgcctgtgacatctacatctgggcgcccttggccgggacttgtggggtccttctcctgtcactggttatcaccctttactgcaaacggggcagaaagaaactcctgtatatattcaaacaaccatttatgagaccagtacaaactactcaagaggaagatggctgtagctgccgatttccagaagaagaagaaggaggatgtgaactgagagtgaagttcagcaggagcgcagacgcccccgcgtaccagcagggccagaaccagctctataacgagctgaatctaggacgaagagaggagtacgatgttttggacaagagacgtggccgggaccctgagatggggggaaagccgagaaggaagaaccctcaggaaggcctgtacaatgaactgcagaaagataagatggcggaggcctacagtgagattgggatgaaaggcgagcgccggaggggcaaggggcacgatggcctttaccagggtctcagtacagccaccaaggacacctacgacgcccttcacatgcaggccctgccccctcgctaa

SEQ ID NO: 8557 - DNA, 1491 bp, synthetic construct
  source 1..1491: mol_type = other DNA
atggccttaccagtgaccgccttgctcctgccgctggccttgctgctccacgccgccaggccggcccgcagcgaggaccgcttccgcggaggcagcggagacatccagatgacacagagccctagcagcctgtctgccagcgtgggagacagagtgaccatcacatgcaaggccagccaggatgtgggcacagccgtggattggtatcagcagaagcctggcaaggcccctaagctgctgatctactgggccagcacaagacacacaggcgtgcccagcagattttctggcagcggctctggcaccgacttcaccctgacaatatccagcctccagcctgaggacttcgccacctactactgccagcagtacaacagctaccctctgaccttcggccagggcaccaaggtggaaatcaaaagaggcggaggcggatctggcggcggaggtagcggtggcggaggatctgaagtgcagctggttgaatcaggtggcggcctggttcaacctggcggatctctgagactgagctgtgccgccagcggctacacctttaccgagtacacaatccactgggtccgacaggcccctggcaaaggacttgagtgggtcgccaacatcaaccccaacaatggcggcaccacctacaaccagaagttcgaggacagattcaccatcagccgggacaacagcaagaacaccctgtacctccagatgaactccctgagagccgaggacaccgccgtgtactattgtgccagaggctggaacttcgactactggggccagggaacactggtcaccgttagctctacgcgtaccacgacgccagcgccgcgaccaccaacaccggcgcccaccatcgcgtcgcagcccctgtccctgcgcccagaggcgtgccggccagcggcggggggcgcagtgcacacgagggggctggacttcgcctgtgacatctacatctgggcgcccttggccgggacttgtggggtccttctcctgtcactggttatcaccctttactgcaaacggggcagaaagaaactcctgtatatattcaaacaaccatttatgagaccagtacaaactactcaagaggaagatggctgtagctgccgatttccagaagaagaagaaggaggatgtgaactgagagtgaagttcagcaggagcgcagacgcccccgcgtaccagcagggccagaaccagctctataacgagctgaatctaggacgaagagaggagtacgatgttttggacaagagacgtggccgggaccctgagatggggggaaagccgagaaggaagaaccctcaggaaggcctgtacaatgaactgcagaaagataagatggcggaggcctacagtgagattgggatgaaaggcgagcgccggaggggcaaggggcacgatggcctttaccagggtctcagtacagccaccaaggacacctacgacgcccttcacatgcaggccctgccccctcgctaa

SEQ ID NO: 8558 - DNA, 1491 bp, synthetic construct
  source 1..1491: mol_type = other DNA
atggccttaccagtgaccgccttgctcctgccgctggccttgctgctccacgccgccaggccggcccgcagcgaggaccgccaccgcggaggcagcggagacatccagatgacacagagccctagcagcctgtctgccagcgtgggagacagagtgaccatcacatgcaaggccagccaggatgtgggcacagccgtggattggtatcagcagaagcctggcaaggcccctaagctgctgatctactgggccagcacaagacacacaggcgtgcccagcagattttctggcagcggctctggcaccgacttcaccctgacaatatccagcctccagcctgaggacttcgccacctactactgccagcagtacaacagctaccctctgaccttcggccagggcaccaaggtggaaatcaaaagaggcggaggcggatctggcggcggaggtagcggtggcggaggatctgaagtgcagctggttgaatcaggtggcggcctggttcaacctggcggatctctgagactgagctgtgccgccagcggctacacctttaccgagtacacaatccactgggtccgacaggcccctggcaaaggacttgagtgggtcgccaacatcaaccccaacaatggcggcaccacctacaaccagaagttcgaggacagattcaccatcagccgggacaacagcaagaacaccctgtacctccagatgaactccctgagagccgaggacaccgccgtgtactattgtgccagaggctggaacttcgactactggggccagggaacactggtcaccgttagctctacgcgtaccacgacgccagcgccgcgaccaccaacaccggcgcccaccatcgcgtcgcagcccctgtccctgcgcccagaggcgtgccggccagcggcggggggcgcagtgcacacgagggggctggacttcgcctgtgacatctacatctgggcgcccttggccgggacttgtggggtccttctcctgtcactggttatcaccctttactgcaaacggggcagaaagaaactcctgtatatattcaaacaaccatttatgagaccagtacaaactactcaagaggaagatggctgtagctgccgatttccagaagaagaagaaggaggatgtgaactgagagtgaagttcagcaggagcgcagacgcccccgcgtaccagcagggccagaaccagctctataacgagctgaatctaggacgaagagaggagtacgatgttttggacaagagacgtggccgggaccctgagatggggggaaagccgagaaggaagaaccctcaggaaggcctgtacaatgaactgcagaaagataagatggcggaggcctacagtgagattgggatgaaaggcgagcgccggaggggcaaggggcacgatggcctttaccagggtctcagtacagccaccaaggacacctacgacgcccttcacatgcaggccctgccccctcgctaa

SEQ ID NO: 8559 - DNA, 1488 bp, synthetic construct
  source 1..1488: mol_type = other DNA
atggccttaccagtgaccgccttgctcctgccgctggccttgctgctccacgccgccaggccgcgcagcgaggaccgcttcaagggaggcagcggagacatccagatgacacagagccctagcagcctgtctgccagcgtgggagacagagtgaccatcacatgcaaggccagccaggatgtgggcacagccgtggattggtatcagcagaagcctggcaaggcccctaagctgctgatctactgggccagcacaagacacacaggcgtgcccagcagattttctggcagcggctctggcaccgacttcaccctgacaatatccagcctccagcctgaggacttcgccacctactactgccagcagtacaacagctaccctctgaccttcggccagggcaccaaggtggaaatcaaaagaggcggaggcggatctggcggcggaggtagcggtggcggaggatctgaagtgcagctggttgaatcaggtggcggcctggttcaacctggcggatctctgagactgagctgtgccgccagcggctacacctttaccgagtacacaatccactgggtccgacaggcccctggcaaaggacttgagtgggtcgccaacatcaaccccaacaatggcggcaccacctacaaccagaagttcgaggacagattcaccatcagccgggacaacagcaagaacaccctgtacctccagatgaactccctgagagccgaggacaccgccgtgtactattgtgccagaggctggaacttcgactactggggccagggaacactggtcaccgttagctctacgcgtaccacgacgccagcgccgcgaccaccaacaccggcgcccaccatcgcgtcgcagcccctgtccctgcgcccagaggcgtgccggccagcggcggggggcgcagtgcacacgagggggctggacttcgcctgtgacatctacatctgggcgcccttggccgggacttgtggggtccttctcctgtcactggttatcaccctttactgcaaacggggcagaaagaaactcctgtatatattcaaacaaccatttatgagaccagtacaaactactcaagaggaagatggctgtagctgccgatttccagaagaagaagaaggaggatgtgaactgagagtgaagttcagcaggagcgcagacgcccccgcgtaccagcagggccagaaccagctctataacgagctgaatctaggacgaagagaggagtacgatgttttggacaagagacgtggccgggaccctgagatggggggaaagccgagaaggaagaaccctcaggaaggcctgtacaatgaactgcagaaagataagatggcggaggcctacagtgagattgggatgaaaggcgagcgccggaggggcaaggggcacgatggcctttaccagggtctcagtacagccaccaaggacacctacgacgcccttcacatgcaggccctgccccctcgctaa

SEQ ID NO: 8560 - DNA, 1488 bp, synthetic construct
  source 1..1488: mol_type = other DNA
atggccttaccagtgaccgccttgctcctgccgctggccttgctgctccacgccgccaggccgcgcagcgaggaccgccacaagggaggcagcggagacatccagatgacacagagccctagcagcctgtctgccagcgtgggagacagagtgaccatcacatgcaaggccagccaggatgtgggcacagccgtggattggtatcagcagaagcctggcaaggcccctaagctgctgatctactgggccagcacaagacacacaggcgtgcccagcagattttctggcagcggctctggcaccgacttcaccctgacaatatccagcctccagcctgaggacttcgccacctactactgccagcagtacaacagctaccctctgaccttcggccagggcaccaaggtggaaatcaaaagaggcggaggcggatctggcggcggaggtagcggtggcggaggatctgaagtgcagctggttgaatcaggtggcggcctggttcaacctggcggatctctgagactgagctgtgccgccagcggctacacctttaccgagtacacaatccactgggtccgacaggcccctggcaaaggacttgagtgggtcgccaacatcaaccccaacaatggcggcaccacctacaaccagaagttcgaggacagattcaccatcagccgggacaacagcaagaacaccctgtacctccagatgaactccctgagagccgaggacaccgccgtgtactattgtgccagaggctggaacttcgactactggggccagggaacactggtcaccgttagctctacgcgtaccacgacgccagcgccgcgaccaccaacaccggcgcccaccatcgcgtcgcagcccctgtccctgcgcccagaggcgtgccggccagcggcggggggcgcagtgcacacgagggggctggacttcgcctgtgacatctacatctgggcgcccttggccgggacttgtggggtccttctcctgtcactggttatcaccctttactgcaaacggggcagaaagaaactcctgtatatattcaaacaaccatttatgagaccagtacaaactactcaagaggaagatggctgtagctgccgatttccagaagaagaagaaggaggatgtgaactgagagtgaagttcagcaggagcgcagacgcccccgcgtaccagcagggccagaaccagctctataacgagctgaatctaggacgaagagaggagtacgatgttttggacaagagacgtggccgggaccctgagatggggggaaagccgagaaggaagaaccctcaggaaggcctgtacaatgaactgcagaaagataagatggcggaggcctacagtgagattgggatgaaaggcgagcgccggaggggcaaggggcacgatggcctttaccagggtctcagtacagccaccaaggacacctacgacgcccttcacatgcaggccctgccccctcgctaa

SEQ ID NO: 8561 - DNA, 1488 bp, synthetic construct; identical to SEQ ID NO: 8408
  source 1..1488: mol_type = other DNA

SEQ ID NO: 8562 - DNA, 1488 bp, synthetic construct; identical to SEQ ID NO: 8411
  source 1..1488: mol_type = other DNA

SEQ ID NO: 8563 - DNA, 1488 bp, synthetic construct; identical to SEQ ID NO: 8412
  source 1..1488: mol_type = other DNA

SEQ ID NO: 8564 - DNA, 1488 bp, synthetic construct
  source 1..1488: mol_type = other DNA
atggccttaccagtgaccgccttgctcctgccgctggccttgctgctccacgccgccaggccgcgcagcgagtggcgctacaagggaggcagcggagacatccagatgacacagagccctagcagcctgtctgccagcgtgggagacagagtgaccatcacatgcaaggccagccaggatgtgggcacagccgtggattggtatcagcagaagcctggcaaggcccctaagctgctgatctactgggccagcacaagacacacaggcgtgcccagcagattttctggcagcggctctggcaccgacttcaccctgacaatatccagcctccagcctgaggacttcgccacctactactgccagcagtacaacagctaccctctgaccttcggccagggcaccaaggtggaaatcaaaagaggcggaggcggatctggcggcggaggtagcggtggcggaggatctgaagtgcagctggttgaatcaggtggcggcctggttcaacctggcggatctctgagactgagctgtgccgccagcggctacacctttaccgagtacacaatccactgggtccgacaggcccctggcaaaggacttgagtgggtcgccaacatcaaccccaacaatggcggcaccacctacaaccagaagttcgaggacagattcaccatcagccgggacaacagcaagaacaccctgtacctccagatgaactccctgagagccgaggacaccgccgtgtactattgtgccagaggctggaacttcgactactggggccagggaacactggtcaccgttagctctacgcgtaccacgacgccagcgccgcgaccaccaacaccggcgcccaccatcgcgtcgcagcccctgtccctgcgcccagaggcgtgccggccagcggcggggggcgcagtgcacacgagggggctggacttcgcctgtgacatctacatctgggcgcccttggccgggacttgtggggtccttctcctgtcactggttatcaccctttactgcaaacggggcagaaagaaactcctgtatatattcaaacaaccatttatgagaccagtacaaactactcaagaggaagatggctgtagctgccgatttccagaagaagaagaaggaggatgtgaactgagagtgaagttcagcaggagcgcagacgcccccgcgtaccagcagggccagaaccagctctataacgagctgaatctaggacgaagagaggagtacgatgttttggacaagagacgtggccgggaccctgagatggggggaaagccgagaaggaagaaccctcaggaaggcctgtacaatgaactgcagaaagataagatggcggaggcctacagtgagattgggatgaaaggcgagcgccggaggggcaaggggcacgatggcctttaccagggtctcagtacagccaccaaggacacctacgacgcccttcacatgcaggccctgccccctcgctaa

SEQ ID NO: 8565 - DNA, 1488 bp, synthetic construct
  source 1..1488: mol_type = other DNA
atggccttaccagtgaccgccttgctcctgccgctggccttgctgctccacgccgccaggccgcgcagcgagtaccgctacaagggaggcagcggagacatccagatgacacagagccctagcagcctgtctgccagcgtgggagacagagtgaccatcacatgcaaggccagccaggatgtgggcacagccgtggattggtatcagcagaagcctggcaaggcccctaagctgctgatctactgggccagcacaagacacacaggcgtgcccagcagattttctggcagcggctctggcaccgacttcaccctgacaatatccagcctccagcctgaggacttcgccacctactactgccagcagtacaacagctaccctctgaccttcggccagggcaccaaggtggaaatcaaaagaggcggaggcggatctggcggcggaggtagcggtggcggaggatctgaagtgcagctggttgaatcaggtggcggcctggttcaacctggcggatctctgagactgagctgtgccgccagcggctacacctttaccgagtacacaatccactgggtccgacaggcccctggcaaaggacttgagtgggtcgccaacatcaaccccaacaatggcggcaccacctacaaccagaagttcgaggacagattcaccatcagccgggacaacagcaagaacaccctgtacctccagatgaactccctgagagccgaggacaccgccgtgtactattgtgccagaggctggaacttcgactactggggccagggaacactggtcaccgttagctctacgcgtaccacgacgccagcgccgcgaccaccaacaccggcgcccaccatcgcgtcgcagcccctgtccctgcgcccagaggcgtgccggccagcggcggggggcgcagtgcacacgagggggctggacttcgcctgtgacatctacatctgggcgcccttggccgggacttgtggggtccttctcctgtcactggttatcaccctttactgcaaacggggcagaaagaaactcctgtatatattcaaacaaccatttatgagaccagtacaaactactcaagaggaagatggctgtagctgccgatttccagaagaagaagaaggaggatgtgaactgagagtgaagttcagcaggagcgcagacgcccccgcgtaccagcagggccagaaccagctctataacgagctgaatctaggacgaagagaggagtacgatgttttggacaagagacgtggccgggaccctgagatggggggaaagccgagaaggaagaaccctcaggaaggcctgtacaatgaactgcagaaagataagatggcggaggcctacagtgagattgggatgaaaggcgagcgccggaggggcaaggggcacgatggcctttaccagggtctcagtacagccaccaaggacacctacgacgcccttcacatgcaggccctgccccctcgctaa

SEQ ID NO: 8566 - DNA, 1488 bp, synthetic construct
  source 1..1488: mol_type = other DNA
atggccttaccagtgaccgccttgctcctgccgctggccttgctgctccacgccgccaggccgcgcagcgagcgccgctacaagggaggcagcggagacatccagatgacacagagccctagcagcctgtctgccagcgtgggagacagagtgaccatcacatgcaaggccagccaggatgtgggcacagccgtggattggtatcagcagaagcctggcaaggcccctaagctgctgatctactgggccagcacaagacacacaggcgtgcccagcagattttctggcagcggctctggcaccgacttcaccctgacaatatccagcctccagcctgaggacttcgccacctactactgccagcagtacaacagctaccctctgaccttcggccagggcaccaaggtggaaatcaaaagaggcggaggcggatctggcggcggaggtagcggtggcggaggatctgaagtgcagctggttgaatcaggtggcggcctggttcaacctggcggatctctgagactgagctgtgccgccagcggctacacctttaccgagtacacaatccactgggtccgacaggcccctggcaaaggacttgagtgggtcgccaacatcaaccccaacaatggcggcaccacctacaaccagaagttcgaggacagattcaccatcagccgggacaacagcaagaacaccctgtacctccagatgaactccctgagagccgaggacaccgccgtgtactattgtgccagaggctggaacttcgactactggggccagggaacactggtcaccgttagctctacgcgtaccacgacgccagcgccgcgaccaccaacaccggcgcccaccatcgcgtcgcagcccctgtccctgcgcccagaggcgtgccggccagcggcggggggcgcagtgcacacgagggggctggacttcgcctgtgacatctacatctgggcgcccttggccgggacttgtggggtccttctcctgtcactggttatcaccctttactgcaaacggggcagaaagaaactcctgtatatattcaaacaaccatttatgagaccagtacaaactactcaagaggaagatggctgtagctgccgatttccagaagaagaagaaggaggatgtgaactgagagtgaagttcagcaggagcgcagacgcccccgcgtaccagcagggccagaaccagctctataacgagctgaatctaggacgaagagaggagtacgatgttttggacaagagacgtggccgggaccctgagatggggggaaagccgagaaggaagaaccctcaggaaggcctgtacaatgaactgcagaaagataagatggcggaggcctacagtgagattgggatgaaaggcgagcgccggaggggcaaggggcacgatggcctttaccagggtctcagtacagccaccaaggacacctacgacgcccttcacatgcaggccctgccccctcgctaa

SEQ ID NO: 8567 - DNA, 1488 bp, synthetic construct
  source 1..1488: mol_type = other DNA
atggccttaccagtgaccgccttgctcctgccgctggccttgctgctccacgccgccaggccgcgcagcgaggtgcgctacaagggaggcagcggagacatccagatgacacagagccctagcagcctgtctgccagcgtgggagacagagtgaccatcacatgcaaggccagccaggatgtgggcacagccgtggattggtatcagcagaagcctggcaaggcccctaagctgctgatctactgggccagcacaagacacacaggcgtgcccagcagattttctggcagcggctctggcaccgacttcaccctgacaatatccagcctccagcctgaggacttcgccacctactactgccagcagtacaacagctaccctctgaccttcggccagggcaccaaggtggaaatcaaaagaggcggaggcggatctggcggcggaggtagcggtggcggaggatctgaagtgcagctggttgaatcaggtggcggcctggttcaacctggcggatctctgagactgagctgtgccgccagcggctacacctttaccgagtacacaatccactgggtccgacaggcccctggcaaaggacttgagtgggtcgccaacatcaaccccaacaatggcggcaccacctacaaccagaagttcgaggacagattcaccatcagccgggacaacagcaagaacaccctgtacctccagatgaactccctgagagccgaggacaccgccgtgtactattgtgccagaggctggaacttcgactactggggccagggaacactggtcaccgttagctctacgcgtaccacgacgccagcgccgcgaccaccaacaccggcgcccaccatcgcgtcgcagcccctgtccctgcgcccagaggcgtgccggccagcggcggggggcgcagtgcacacgagggggctggacttcgcctgtgacatctacatctgggcgcccttggccgggacttgtggggtccttctcctgtcactggttatcaccctttactgcaaacggggcagaaagaaactcctgtatatattcaaacaaccatttatgagaccagtacaaactactcaagaggaagatggctgtagctgccgatttccagaagaagaagaaggaggatgtgaactgagagtgaagttcagcaggagcgcagacgcccccgcgtaccagcagggccagaaccagctctataacgagctgaatctaggacgaagagaggagtacgatgttttggacaagagacgtggccgggaccctgagatggggggaaagccgagaaggaagaaccctcaggaaggcctgtacaatgaactgcagaaagataagatggcggaggcctacagtgagattgggatgaaaggcgagcgccggaggggcaaggggcacgatggcctttaccagggtctcagtacagccaccaaggacacctacgacgcccttcacatgcaggccctgccccctcgctaa

SEQ ID NO: 8568 - DNA, 1488 bp, synthetic construct
  source 1..1488: mol_type = other DNA
atggccttaccagtgaccgccttgctcctgccgctggccttgctgctccacgccgccaggccgcgcatcgaggaccgctacaagggaggcagcggagacatccagatgacacagagccctagcagcctgtctgccagcgtgggagacagagtgaccatcacatgcaaggccagccaggatgtgggcacagccgtggattggtatcagcagaagcctggcaaggcccctaagctgctgatctactgggccagcacaagacacacaggcgtgcccagcagattttctggcagcggctctggcaccgacttcaccctgacaatatccagcctccagcctgaggacttcgccacctactactgccagcagtacaacagctaccctctgaccttcggccagggcaccaaggtggaaatcaaaagaggcggaggcggatctggcggcggaggtagcggtggcggaggatctgaagtgcagctggttgaatcaggtggcggcctggttcaacctggcggatctctgagactgagctgtgccgccagcggctacacctttaccgagtacacaatccactgggtccgacaggcccctggcaaaggacttgagtgggtcgccaacatcaaccccaacaatggcggcaccacctacaaccagaagttcgaggacagattcaccatcagccgggacaacagcaagaacaccctgtacctccagatgaactccctgagagccgaggacaccgccgtgtactattgtgccagaggctggaacttcgactactggggccagggaacactggtcaccgttagctctacgcgtaccacgacgccagcgccgcgaccaccaacaccggcgcccaccatcgcgtcgcagcccctgtccctgcgcccagaggcgtgccggccagcggcggggggcgcagtgcacacgagggggctggacttcgcctgtgacatctacatctgggcgcccttggccgggacttgtggggtccttctcctgtcactggttatcaccctttactgcaaacggggcagaaagaaactcctgtatatattcaaacaaccatttatgagaccagtacaaactactcaagaggaagatggctgtagctgccgatttccagaagaagaagaaggaggatgtgaactgagagtgaagttcagcaggagcgcagacgcccccgcgtaccagcagggccagaaccagctctataacgagctgaatctaggacgaagagaggagtacgatgttttggacaagagacgtggccgggaccctgagatggggggaaagccgagaaggaagaaccctcaggaaggcctgtacaatgaactgcagaaagataagatggcggaggcctacagtgagattgggatgaaaggcgagcgccggaggggcaaggggcacgatggcctttaccagggtctcagtacagccaccaaggacacctacgacgcccttcacatgcaggccctgccccctcgctaa

SEQ ID NO: 8569 - DNA, 1488 bp, synthetic construct
  source 1..1488: mol_type = other DNA
atggccttaccagtgaccgccttgctcctgccgctggccttgctgctccacgccgccaggccgcgcctggaggaccgctacaagggaggcagcggagacatccagatgacacagagccctagcagcctgtctgccagcgtgggagacagagtgaccatcacatgcaaggccagccaggatgtgggcacagccgtggattggtatcagcagaagcctggcaaggcccctaagctgctgatctactgggccagcacaagacacacaggcgtgcccagcagattttctggcagcggctctggcaccgacttcaccctgacaatatccagcctccagcctgaggacttcgccacctactactgccagcagtacaacagctaccctctgaccttcggccagggcaccaaggtggaaatcaaaagaggcggaggcggatctggcggcggaggtagcggtggcggaggatctgaagtgcagctggttgaatcaggtggcggcctggttcaacctggcggatctctgagactgagctgtgccgccagcggctacacctttaccgagtacacaatccactgggtccgacaggcccctggcaaaggacttgagtgggtcgccaacatcaaccccaacaatggcggcaccacctacaaccagaagttcgaggacagattcaccatcagccgggacaacagcaagaacaccctgtacctccagatgaactccctgagagccgaggacaccgccgtgtactattgtgccagaggctggaacttcgactactggggccagggaacactggtcaccgttagctctacgcgtaccacgacgccagcgccgcgaccaccaacaccggcgcccaccatcgcgtcgcagcccctgtccctgcgcccagaggcgtgccggccagcggcggggggcgcagtgcacacgagggggctggacttcgcctgtgacatctacatctgggcgcccttggccgggacttgtggggtccttctcctgtcactggttatcaccctttactgcaaacggggcagaaagaaactcctgtatatattcaaacaaccatttatgagaccagtacaaactactcaagaggaagatggctgtagctgccgatttccagaagaagaagaaggaggatgtgaactgagagtgaagttcagcaggagcgcagacgcccccgcgtaccagcagggccagaaccagctctataacgagctgaatctaggacgaagagaggagtacgatgttttggacaagagacgtggccgggaccctgagatggggggaaagccgagaaggaagaaccctcaggaaggcctgtacaatgaactgcagaaagataagatggcggaggcctacagtgagattgggatgaaaggcgagcgccggaggggcaaggggcacgatggcctttaccagggtctcagtacagccaccaaggacacctacgacgcccttcacatgcaggccctgccccctcgctaa

SEQ ID NO: 8570 - DNA, 1488 bp, synthetic construct
  source 1..1488: mol_type = other DNA
atggccttaccagtgaccgccttgctcctgccgctggccttgctgctccacgccgccaggccgcgcatggaggaccgctacaagggaggcagcggagacatccagatgacacagagccctagcagcctgtctgccagcgtgggagacagagtgaccatcacatgcaaggccagccaggatgtgggcacagccgtggattggtatcagcagaagcctggcaaggcccctaagctgctgatctactgggccagcacaagacacacaggcgtgcccagcagattttctggcagcggctctggcaccgacttcaccctgacaatatccagcctccagcctgaggacttcgccacctactactgccagcagtacaacagctaccctctgaccttcggccagggcaccaaggtggaaatcaaaagaggcggaggcggatctggcggcggaggtagcggtggcggaggatctgaagtgcagctggttgaatcaggtggcggcctggttcaacctggcggatctctgagactgagctgtgccgccagcggctacacctttaccgagtacacaatccactgggtccgacaggcccctggcaaaggacttgagtgggtcgccaacatcaaccccaacaatggcggcaccacctacaaccagaagttcgaggacagattcaccatcagccgggacaacagcaagaacaccctgtacctccagatgaactccctgagagccgaggacaccgccgtgtactattgtgccagaggctggaacttcgactactggggccagggaacactggtcaccgttagctctacgcgtaccacgacgccagcgccgcgaccaccaacaccggcgcccaccatcgcgtcgcagcccctgtccctgcgcccagaggcgtgccggccagcggcggggggcgcagtgcacacgagggggctggacttcgcctgtgacatctacatctgggcgcccttggccgggacttgtggggtccttctcctgtcactggttatcaccctttactgcaaacggggcagaaagaaactcctgtatatattcaaacaaccatttatgagaccagtacaaactactcaagaggaagatggctgtagctgccgatttccagaagaagaagaaggaggatgtgaactgagagtgaagttcagcaggagcgcagacgcccccgcgtaccagcagggccagaaccagctctataacgagctgaatctaggacgaagagaggagtacgatgttttggacaagagacgtggccgggaccctgagatggggggaaagccgagaaggaagaaccctcaggaaggcctgtacaatgaactgcagaaagataagatggcggaggcctacagtgagattgggatgaaaggcgagcgccggaggggcaaggggcacgatggcctttaccagggtctcagtacagccaccaaggacacctacgacgcccttcacatgcaggccctgccccctcgctaa

SEQ ID NO: 8571 - DNA, 1488 bp, synthetic construct
  source 1..1488: mol_type = other DNA
atggccttaccagtgaccgccttgctcctgccgctggccttgctgctccacgccgccaggccgcgcgtggaggaccgctacaagggaggcagcggagacatccagatgacacagagccctagcagcctgtctgccagcgtgggagacagagtgaccatcacatgcaaggccagccaggatgtgggcacagccgtggattggtatcagcagaagcctggcaaggcccctaagctgctgatctactgggccagcacaagacacacaggcgtgcccagcagattttctggcagcggctctggcaccgacttcaccctgacaatatccagcctccagcctgaggacttcgccacctactactgccagcagtacaacagctaccctctgaccttcggccagggcaccaaggtggaaatcaaaagaggcggaggcggatctggcggcggaggtagcggtggcggaggatctgaagtgcagctggttgaatcaggtggcggcctggttcaacctggcggatctctgagactgagctgtgccgccagcggctacacctttaccgagtacacaatccactgggtccgacaggcccctggcaaaggacttgagtgggtcgccaacatcaaccccaacaatggcggcaccacctacaaccagaagttcgaggacagattcaccatcagccgggacaacagcaagaacaccctgtacctccagatgaactccctgagagccgaggacaccgccgtgtactattgtgccagaggctggaacttcgactactggggccagggaacactggtcaccgttagctctacgcgtaccacgacgccagcgccgcgaccaccaacaccggcgcccaccatcgcgtcgcagcccctgtccctgcgcccagaggcgtgccggccagcggcggggggcgcagtgcacacgagggggctggacttcgcctgtgacatctacatctgggcgcccttggccgggacttgtggggtccttctcctgtcactggttatcaccctttactgcaaacggggcagaaagaaactcctgtatatattcaaacaaccatttatgagaccagtacaaactactcaagaggaagatggctgtagctgccgatttccagaagaagaagaaggaggatgtgaactgagagtgaagttcagcaggagcgcagacgcccccgcgtaccagcagggccagaaccagctctataacgagctgaatctaggacgaagagaggagtacgatgttttggacaagagacgtggccgggaccctgagatggggggaaagccgagaaggaagaaccctcaggaaggcctgtacaatgaactgcagaaagataagatggcggaggcctacagtgagattgggatgaaaggcgagcgccggaggggcaaggggcacgatggcctttaccagggtctcagtacagccaccaaggacacctacgacgcccttcacatgcaggccctgccccctcgctaa

SEQ ID NO: 8572 - DNA, 1488 bp, synthetic construct
  source 1..1488: mol_type = other DNA
atggccttaccagtgaccgccttgctcctgccgctggccttgctgctccacgccgccaggccgcgcgccgaggaccgctacaagggaggcagcggagacatccagatgacacagagccctagcagcctgtctgccagcgtgggagacagagtgaccatcacatgcaaggccagccaggatgtgggcacagccgtggattggtatcagcagaagcctggcaaggcccctaagctgctgatctactgggccagcacaagacacacaggcgtgcccagcagattttctggcagcggctctggcaccgacttcaccctgacaatatccagcctccagcctgaggacttcgccacctactactgccagcagtacaacagctaccctctgaccttcggccagggcaccaaggtggaaatcaaaagaggcggaggcggatctggcggcggaggtagcggtggcggaggatctgaagtgcagctggttgaatcaggtggcggcctggttcaacctggcggatctctgagactgagctgtgccgccagcggctacacctttaccgagtacacaatccactgggtccgacaggcccctggcaaaggacttgagtgggtcgccaacatcaaccccaacaatggcggcaccacctacaaccagaagttcgaggacagattcaccatcagccgggacaacagcaagaacaccctgtacctccagatgaactccctgagagccgaggacaccgccgtgtactattgtgccagaggctggaacttcgactactggggccagggaacactggtcaccgttagctctacgcgtaccacgacgccagcgccgcgaccaccaacaccggcgcccaccatcgcgtcgcagcccctgtccctgcgcccagaggcgtgccggccagcggcggggggcgcagtgcacacgagggggctggacttcgcctgtgacatctacatctgggcgcccttggccgggacttgtggggtccttctcctgtcactggttatcaccctttactgcaaacggggcagaaagaaactcctgtatatattcaaacaaccatttatgagaccagtacaaactactcaagaggaagatggctgtagctgccgatttccagaagaagaagaaggaggatgtgaactgagagtgaagttcagcaggagcgcagacgcccccgcgtaccagcagggccagaaccagctctataacgagctgaatctaggacgaagagaggagtacgatgttttggacaagagacgtggccgggaccctgagatggggggaaagccgagaaggaagaaccctcaggaaggcctgtacaatgaactgcagaaagataagatggcggaggcctacagtgagattgggatgaaaggcgagcgccggaggggcaaggggcacgatggcctttaccagggtctcagtacagccaccaaggacacctacgacgcccttcacatgcaggccctgccccctcgctaa

SEQ ID NO: 8573 - DNA, 1488 bp, synthetic construct
  source 1..1488: mol_type = other DNA
atggccttaccagtgaccgccttgctcctgccgctggccttgctgctccacgccgccaggccgcgcttcgaggaccgctacaagggaggcagcggagacatccagatgacacagagccctagcagcctgtctgccagcgtgggagacagagtgaccatcacatgcaaggccagccaggatgtgggcacagccgtggattggtatcagcagaagcctggcaaggcccctaagctgctgatctactgggccagcacaagacacacaggcgtgcccagcagattttctggcagcggctctggcaccgacttcaccctgacaatatccagcctccagcctgaggacttcgccacctactactgccagcagtacaacagctaccctctgaccttcggccagggcaccaaggtggaaatcaaaagaggcggaggcggatctggcggcggaggtagcggtggcggaggatctgaagtgcagctggttgaatcaggtggcggcctggttcaacctggcggatctctgagactgagctgtgccgccagcggctacacctttaccgagtacacaatccactgggtccgacaggcccctggcaaaggacttgagtgggtcgccaacatcaaccccaacaatggcggcaccacctacaaccagaagttcgaggacagattcaccatcagccgggacaacagcaagaacaccctgtacctccagatgaactccctgagagccgaggacaccgccgtgtactattgtgccagaggctggaacttcgactactggggccagggaacactggtcaccgttagctctacgcgtaccacgacgccagcgccgcgaccaccaacaccggcgcccaccatcgcgtcgcagcccctgtccctgcgcccagaggcgtgccggccagcggcggggggcgcagtgcacacgagggggctggacttcgcctgtgacatctacatctgggcgcccttggccgggacttgtggggtccttctcctgtcactggttatcaccctttactgcaaacggggcagaaagaaactcctgtatatattcaaacaaccatttatgagaccagtacaaactactcaagaggaagatggctgtagctgccgatttccagaagaagaagaaggaggatgtgaactgagagtgaagttcagcaggagcgcagacgcccccgcgtaccagcagggccagaaccagctctataacgagctgaatctaggacgaagagaggagtacgatgttttggacaagagacgtggccgggaccctgagatggggggaaagccgagaaggaagaaccctcaggaaggcctgtacaatgaactgcagaaagataagatggcggaggcctacagtgagattgggatgaaaggcgagcgccggaggggcaaggggcacgatggcctttaccagggtctcagtacagccaccaaggacacctacgacgcccttcacatgcaggccctgccccctcgctaa

SEQ ID NO: 8574 - DNA, 1488 bp, synthetic construct
  source 1..1488: mol_type = other DNA
atggccttaccagtgaccgccttgctcctgccgctggccttgctgctccacgccgccaggccgcgccacgaggaccgctacaagggaggcagcggagacatccagatgacacagagccctagcagcctgtctgccagcgtgggagacagagtgaccatcacatgcaaggccagccaggatgtgggcacagccgtggattggtatcagcagaagcctggcaaggcccctaagctgctgatctactgggccagcacaagacacacaggcgtgcccagcagattttctggcagcggctctggcaccgacttcaccctgacaatatccagcctccagcctgaggacttcgccacctactactgccagcagtacaacagctaccctctgaccttcggccagggcaccaaggtggaaatcaaaagaggcggaggcggatctggcggcggaggtagcggtggcggaggatctgaagtgcagctggttgaatcaggtggcggcctggttcaacctggcggatctctgagactgagctgtgccgccagcggctacacctttaccgagtacacaatccactgggtccgacaggcccctggcaaaggacttgagtgggtcgccaacatcaaccccaacaatggcggcaccacctacaaccagaagttcgaggacagattcaccatcagccgggacaacagcaagaacaccctgtacctccagatgaactccctgagagccgaggacaccgccgtgtactattgtgccagaggctggaacttcgactactggggccagggaacactggtcaccgttagctctacgcgtaccacgacgccagcgccgcgaccaccaacaccggcgcccaccatcgcgtcgcagcccctgtccctgcgcccagaggcgtgccggccagcggcggggggcgcagtgcacacgagggggctggacttcgcctgtgacatctacatctgggcgcccttggccgggacttgtggggtccttctcctgtcactggttatcaccctttactgcaaacggggcagaaagaaactcctgtatatattcaaacaaccatttatgagaccagtacaaactactcaagaggaagatggctgtagctgccgatttccagaagaagaagaaggaggatgtgaactgagagtgaagttcagcaggagcgcagacgcccccgcgtaccagcagggccagaaccagctctataacgagctgaatctaggacgaagagaggagtacgatgttttggacaagagacgtggccgggaccctgagatggggggaaagccgagaaggaagaaccctcaggaaggcctgtacaatgaactgcagaaagataagatggcggaggcctacagtgagattgggatgaaaggcgagcgccggaggggcaaggggcacgatggcctttaccagggtctcagtacagccaccaaggacacctacgacgcccttcacatgcaggccctgccccctcgctaa

SEQ ID NO: 8575 - DNA, 1488 bp, synthetic construct
  source 1..1488: mol_type = other DNA
atggccttaccagtgaccgccttgctcctgccgctggccttgctgctccacgccgccaggccgcgcggcgaggaccgctacaagggaggcagcggagacatccagatgacacagagccctagcagcctgtctgccagcgtgggagacagagtgaccatcacatgcaaggccagccaggatgtgggcacagccgtggattggtatcagcagaagcctggcaaggcccctaagctgctgatctactgggccagcacaagacacacaggcgtgcccagcagattttctggcagcggctctggcaccgacttcaccctgacaatatccagcctccagcctgaggacttcgccacctactactgccagcagtacaacagctaccctctgaccttcggccagggcaccaaggtggaaatcaaaagaggcggaggcggatctggcggcggaggtagcggtggcggaggatctgaagtgcagctggttgaatcaggtggcggcctggttcaacctggcggatctctgagactgagctgtgccgccagcggctacacctttaccgagtacacaatccactgggtccgacaggcccctggcaaaggacttgagtgggtcgccaacatcaaccccaacaatggcggcaccacctacaaccagaagttcgaggacagattcaccatcagccgggacaacagcaagaacaccctgtacctccagatgaactccctgagagccgaggacaccgccgtgtactattgtgccagaggctggaacttcgactactggggccagggaacactggtcaccgttagctctacgcgtaccacgacgccagcgccgcgaccaccaacaccggcgcccaccatcgcgtcgcagcccctgtccctgcgcccagaggcgtgccggccagcggcggggggcgcagtgcacacgagggggctggacttcgcctgtgacatctacatctgggcgcccttggccgggacttgtggggtccttctcctgtcactggttatcaccctttactgcaaacggggcagaaagaaactcctgtatatattcaaacaaccatttatgagaccagtacaaactactcaagaggaagatggctgtagctgccgatttccagaagaagaagaaggaggatgtgaactgagagtgaagttcagcaggagcgcagacgcccccgcgtaccagcagggccagaaccagctctataacgagctgaatctaggacgaagagaggagtacgatgttttggacaagagacgtggccgggaccctgagatggggggaaagccgagaaggaagaaccctcaggaaggcctgtacaatgaactgcagaaagataagatggcggaggcctacagtgagattgggatgaaaggcgagcgccggaggggcaaggggcacgatggcctttaccagggtctcagtacagccaccaaggacacctacgacgcccttcacatgcaggccctgccccctcgctaa

SEQ ID NO: 8576 - DNA, 1488 bp, synthetic construct
  source 1..1488: mol_type = other DNA
atggccttaccagtgaccgccttgctcctgccgctggccttgctgctccacgccgccaggccgcgcaccgaggaccgctacaagggaggcagcggagacatccagatgacacagagccctagcagcctgtctgccagcgtgggagacagagtgaccatcacatgcaaggccagccaggatgtgggcacagccgtggattggtatcagcagaagcctggcaaggcccctaagctgctgatctactgggccagcacaagacacacaggcgtgcccagcagattttctggcagcggctctggcaccgacttcaccctgacaatatccagcctccagcctgaggacttcgccacctactactgccagcagtacaacagctaccctctgaccttcggccagggcaccaaggtggaaatcaaaagaggcggaggcggatctggcggcggaggtagcggtggcggaggatctgaagtgcagctggttgaatcaggtggcggcctggttcaacctggcggatctctgagactgagctgtgccgccagcggctacacctttaccgagtacacaatccactgggtccgacaggcccctggcaaaggacttgagtgggtcgccaacatcaaccccaacaatggcggcaccacctacaaccagaagttcgaggacagattcaccatcagccgggacaacagcaagaacaccctgtacctccagatgaactccctgagagccgaggacaccgccgtgtactattgtgccagaggctggaacttcgactactggggccagggaacactggtcaccgttagctctacgcgtaccacgacgccagcgccgcgaccaccaacaccggcgcccaccatcgcgtcgcagcccctgtccctgcgcccagaggcgtgccggccagcggcggggggcgcagtgcacacgagggggctggacttcgcctgtgacatctacatctgggcgcccttggccgggacttgtggggtccttctcctgtcactggttatcaccctttactgcaaacggggcagaaagaaactcctgtatatattcaaacaaccatttatgagaccagtacaaactactcaagaggaagatggctgtagctgccgatttccagaagaagaagaaggaggatgtgaactgagagtgaagttcagcaggagcgcagacgcccccgcgtaccagcagggccagaaccagctctataacgagctgaatctaggacgaagagaggagtacgatgttttggacaagagacgtggccgggaccctgagatggggggaaagccgagaaggaagaaccctcaggaaggcctgtacaatgaactgcagaaagataagatggcggaggcctacagtgagattgggatgaaaggcgagcgccggaggggcaaggggcacgatggcctttaccagggtctcagtacagccaccaaggacacctacgacgcccttcacatgcaggccctgccccctcgctaa

SEQ ID NO: 8577 - DNA, 1488 bp, synthetic construct
  source 1..1488: mol_type = other DNA
atggccttaccagtgaccgccttgctcctgccgctggccttgctgctccacgccgccaggccgagcagcgaggaccgctacaagggaggcagcggagacatccagatgacacagagccctagcagcctgtctgccagcgtgggagacagagtgaccatcacatgcaaggccagccaggatgtgggcacagccgtggattggtatcagcagaagcctggcaaggcccctaagctgctgatctactgggccagcacaagacacacaggcgtgcccagcagattttctggcagcggctctggcaccgacttcaccctgacaatatccagcctccagcctgaggacttcgccacctactactgccagcagtacaacagctaccctctgaccttcggccagggcaccaaggtggaaatcaaaagaggcggaggcggatctggcggcggaggtagcggtggcggaggatctgaagtgcagctggttgaatcaggtggcggcctggttcaacctggcggatctctgagactgagctgtgccgccagcggctacacctttaccgagtacacaatccactgggtccgacaggcccctggcaaaggacttgagtgggtcgccaacatcaaccccaacaatggcggcaccacctacaaccagaagttcgaggacagattcaccatcagccgggacaacagcaagaacaccctgtacctccagatgaactccctgagagccgaggacaccgccgtgtactattgtgccagaggctggaacttcgactactggggccagggaacactggtcaccgttagctctacgcgtaccacgacgccagcgccgcgaccaccaacaccggcgcccaccatcgcgtcgcagcccctgtccctgcgcccagaggcgtgccggccagcggcggggggcgcagtgcacacgagggggctggacttcgcctgtgacatctacatctgggcgcccttggccgggacttgtggggtccttctcctgtcactggttatcaccctttactgcaaacggggcagaaagaaactcctgtatatattcaaacaaccatttatgagaccagtacaaactactcaagaggaagatggctgtagctgccgatttccagaagaagaagaaggaggatgtgaactgagagtgaagttcagcaggagcgcagacgcccccgcgtaccagcagggccagaaccagctctataacgagctgaatctaggacgaagagaggagtacgatgttttggacaagagacgtggccgggaccctgagatggggggaaagccgagaaggaagaaccctcaggaaggcctgtacaatgaactgcagaaagataagatggcggaggcctacagtgagattgggatgaaaggcgagcgccggaggggcaaggggcacgatggcctttaccagggtctcagtacagccaccaaggacacctacgacgcccttcacatgcaggccctgccccctcgctaa

SEQ ID NO: 8578 - DNA, 1488 bp, synthetic construct
  source 1..1488: mol_type = other DNA
atggccttaccagtgaccgccttgctcctgccgctggccttgctgctccacgccgccaggccgcacagcgaggaccgctacaagggaggcagcggagacatccagatgacacagagccctagcagcctgtctgccagcgtgggagacagagtgaccatcacatgcaaggccagccaggatgtgggcacagccgtggattggtatcagcagaagcctggcaaggcccctaagctgctgatctactgggccagcacaagacacacaggcgtgcccagcagattttctggcagcggctctggcaccgacttcaccctgacaatatccagcctccagcctgaggacttcgccacctactactgccagcagtacaacagctaccctctgaccttcggccagggcaccaaggtggaaatcaaaagaggcggaggcggatctggcggcggaggtagcggtggcggaggatctgaagtgcagctggttgaatcaggtggcggcctggttcaacctggcggatctctgagactgagctgtgccgccagcggctacacctttaccgagtacacaatccactgggtccgacaggcccctggcaaaggacttgagtgggtcgccaacatcaaccccaacaatggcggcaccacctacaaccagaagttcgaggacagattcaccatcagccgggacaacagcaagaacaccctgtacctccagatgaactccctgagagccgaggacaccgccgtgtactattgtgccagaggctggaacttcgactactggggccagggaacactggtcaccgttagctctacgcgtaccacgacgccagcgccgcgaccaccaacaccggcgcccaccatcgcgtcgcagcccctgtccctgcgcccagaggcgtgccggccagcggcggggggcgcagtgcacacgagggggctggacttcgcctgtgacatctacatctgggcgcccttggccgggacttgtggggtccttctcctgtcactggttatcaccctttactgcaaacggggcagaaagaaactcctgtatatattcaaacaaccatttatgagaccagtacaaactactcaagaggaagatggctgtagctgccgatttccagaagaagaagaaggaggatgtgaactgagagtgaagttcagcaggagcgcagacgcccccgcgtaccagcagggccagaaccagctctataacgagctgaatctaggacgaagagaggagtacgatgttttggacaagagacgtggccgggaccctgagatggggggaaagccgagaaggaagaaccctcaggaaggcctgtacaatgaactgcagaaagataagatggcggaggcctacagtgagattgggatgaaaggcgagcgccggaggggcaaggggcacgatggcctttaccagggtctcagtacagccaccaaggacacctacgacgcccttcacatgcaggccctgccccctcgctaa

SEQ ID NO: 8579 - DNA, 1488 bp, synthetic construct
  source 1..1488: mol_type = other DNA
atggccttaccagtgaccgccttgctcctgccgctggccttgctgctccacgccgccaggccggacagcgaggaccgctacaagggaggcagcggagacatccagatgacacagagccctagcagcctgtctgccagcgtgggagacagagtgaccatcacatgcaaggccagccaggatgtgggcacagccgtggattggtatcagcagaagcctggcaaggcccctaagctgctgatctactgggccagcacaagacacacaggcgtgcccagcagattttctggcagcggctctggcaccgacttcaccctgacaatatccagcctccagcctgaggacttcgccacctactactgccagcagtacaacagctaccctctgaccttcggccagggcaccaaggtggaaatcaaaagaggcggaggcggatctggcggcggaggtagcggtggcggaggatctgaagtgcagctggttgaatcaggtggcggcctggttcaacctggcggatctctgagactgagctgtgccgccagcggctacacctttaccgagtacacaatccactgggtccgacaggcccctggcaaaggacttgagtgggtcgccaacatcaaccccaacaatggcggcaccacctacaaccagaagttcgaggacagattcaccatcagccgggacaacagcaagaacaccctgtacctccagatgaactccctgagagccgaggacaccgccgtgtactattgtgccagaggctggaacttcgactactggggccagggaacactggtcaccgttagctctacgcgtaccacgacgccagcgccgcgaccaccaacaccggcgcccaccatcgcgtcgcagcccctgtccctgcgcccagaggcgtgccggccagcggcggggggcgcagtgcacacgagggggctggacttcgcctgtgacatctacatctgggcgcccttggccgggacttgtggggtccttctcctgtcactggttatcaccctttactgcaaacggggcagaaagaaactcctgtatatattcaaacaaccatttatgagaccagtacaaactactcaagaggaagatggctgtagctgccgatttccagaagaagaagaaggaggatgtgaactgagagtgaagttcagcaggagcgcagacgcccccgcgtaccagcagggccagaaccagctctataacgagctgaatctaggacgaagagaggagtacgatgttttggacaagagacgtggccgggaccctgagatggggggaaagccgagaaggaagaaccctcaggaaggcctgtacaatgaactgcagaaagataagatggcggaggcctacagtgagattgggatgaaaggcgagcgccggaggggcaaggggcacgatggcctttaccagggtctcagtacagccaccaaggacacctacgacgcccttcacatgcaggccctgccccctcgctaa

SEQ ID NO: 8580 - DNA, 1488 bp, synthetic construct
  source 1..1488: mol_type = other DNA
atggccttaccagtgaccgccttgctcctgccgctggccttgctgctccacgccgccaggccgttcagcgaggaccgctacaagggaggcagcggagacatccagatgacacagagccctagcagcctgtctgccagcgtgggagacagagtgaccatcacatgcaaggccagccaggatgtgggcacagccgtggattggtatcagcagaagcctggcaaggcccctaagctgctgatctactgggccagcacaagacacacaggcgtgcccagcagattttctggcagcggctctggcaccgacttcaccctgacaatatccagcctccagcctgaggacttcgccacctactactgccagcagtacaacagctaccctctgaccttcggccagggcaccaaggtggaaatcaaaagaggcggaggcggatctggcggcggaggtagcggtggcggaggatctgaagtgcagctggttgaatcaggtggcggcctggttcaacctggcggatctctgagactgagctgtgccgccagcggctacacctttaccgagtacacaatccactgggtccgacaggcccctggcaaaggacttgagtgggtcgccaacatcaaccccaacaatggcggcaccacctacaaccagaagttcgaggacagattcaccatcagccgggacaacagcaagaacaccctgtacctccagatgaactccctgagagccgaggacaccgccgtgtactattgtgccagaggctggaacttcgactactggggccagggaacactggtcaccgttagctctacgcgtaccacgacgccagcgccgcgaccaccaacaccggcgcccaccatcgcgtcgcagcccctgtccctgcgcccagaggcgtgccggccagcggcggggggcgcagtgcacacgagggggctggacttcgcctgtgacatctacatctgggcgcccttggccgggacttgtggggtccttctcctgtcactggttatcaccctttactgcaaacggggcagaaagaaactcctgtatatattcaaacaaccatttatgagaccagtacaaactactcaagaggaagatggctgtagctgccgatttccagaagaagaagaaggaggatgtgaactgagagtgaagttcagcaggagcgcagacgcccccgcgtaccagcagggccagaaccagctctataacgagctgaatctaggacgaagagaggagtacgatgttttggacaagagacgtggccgggaccctgagatggggggaaagccgagaaggaagaaccctcaggaaggcctgtacaatgaactgcagaaagataagatggcggaggcctacagtgagattgggatgaaaggcgagcgccggaggggcaaggggcacgatggcctttaccagggtctcagtacagccaccaaggacacctacgacgcccttcacatgcaggccctgccccctcgctaa

SEQ ID NO: 8581 - DNA, 1488 bp, synthetic construct; identical to SEQ ID NO: 8559
  source 1..1488: mol_type = other DNA

SEQ ID NO: 8582 - DNA, 1488 bp, synthetic construct; identical to SEQ ID NO: 8560
  source 1..1488: mol_type = other DNA

SEQ ID NO: 8583 - DNA, 1491 bp, synthetic construct; identical to SEQ ID NO: 8435
  source 1..1491: mol_type = other DNA

SEQ ID NO: 8584 - DNA, 1491 bp, synthetic construct
  source 1..1491: mol_type = other DNA
atggccttaccagtgaccgccttgctcctgccgctggccttgctgctccacgccgccaggccggcccgcagcgaggaccgcttcaagggaggcagcggagacatccagatgacacagagccctagcagcctgtctgccagcgtgggagacagagtgaccatcacatgcaaggccagccaggatgtgggcacagccgtggattggtatcagcagaagcctggcaaggcccctaagctgctgatctactgggccagcacaagacacacaggcgtgcccagcagattttctggcagcggctctggcaccgacttcaccctgacaatatccagcctccagcctgaggacttcgccacctactactgccagcagtacaacagctaccctctgaccttcggccagggcaccaaggtggaaatcaaaagaggcggaggcggatctggcggcggaggtagcggtggcggaggatctgaagtgcagctggttgaatcaggtggcggcctggttcaacctggcggatctctgagactgagctgtgccgccagcggctacacctttaccgagtacacaatccactgggtccgacaggcccctggcaaaggacttgagtgggtcgccaacatcaaccccaacaatggcggcaccacctacaaccagaagttcgaggacagattcaccatcagccgggacaacagcaagaacaccctgtacctccagatgaactccctgagagccgaggacaccgccgtgtactattgtgccagaggctggaacttcgactactggggccagggaacactggtcaccgttagctctacgcgtaccacgacgccagcgccgcgaccaccaacaccggcgcccaccatcgcgtcgcagcccctgtccctgcgcccagaggcgtgccggccagcggcggggggcgcagtgcacacgagggggctggacttcgcctgtgacatctacatctgggcgcccttggccgggacttgtggggtccttctcctgtcactggttatcaccctttactgcaaacggggcagaaagaaactcctgtatatattcaaacaaccatttatgagaccagtacaaactactcaagaggaagatggctgtagctgccgatttccagaagaagaagaaggaggatgtgaactgagagtgaagttcagcaggagcgcagacgcccccgcgtaccagcagggccagaaccagctctataacgagctgaatctaggacgaagagaggagtacgatgttttggacaagagacgtggccgggaccctgagatggggggaaagccgagaaggaagaaccctcaggaaggcctgtacaatgaactgcagaaagataagatggcggaggcctacagtgagattgggatgaaaggcgagcgccggaggggcaaggggcacgatggcctttaccagggtctcagtacagccaccaaggacacctacgacgcccttcacatgcaggccctgccccctcgctaa

SEQ ID NO: 8585 - DNA, 1491 bp, synthetic construct
  source 1..1491: mol_type = other DNA
atggccttaccagtgaccgccttgctcctgccgctggccttgctgctccacgccgccaggccggcccgcagcgaggaccgccacaagggaggcagcggagacatccagatgacacagagccctagcagcctgtctgccagcgtgggagacagagtgaccatcacatgcaaggccagccaggatgtgggcacagccgtggattggtatcagcagaagcctggcaaggcccctaagctgctgatctactgggccagcacaagacacacaggcgtgcccagcagattttctggcagcggctctggcaccgacttcaccctgacaatatccagcctccagcctgaggacttcgccacctactactgccagcagtacaacagctaccctctgaccttcggccagggcaccaaggtggaaatcaaaagaggcggaggcggatctggcggcggaggtagcggtggcggaggatctgaagtgcagctggttgaatcaggtggcggcctggttcaacctggcggatctctgagactgagctgtgccgccagcggctacacctttaccgagtacacaatccactgggtccgacaggcccctggcaaaggacttgagtgggtcgccaacatcaaccccaacaatggcggcaccacctacaaccagaagttcgaggacagattcaccatcagccgggacaacagcaagaacaccctgtacctccagatgaactccctgagagccgaggacaccgccgtgtactattgtgccagaggctggaacttcgactactggggccagggaacactggtcaccgttagctctacgcgtaccacgacgccagcgccgcgaccaccaacaccggcgcccaccatcgcgtcgcagcccctgtccctgcgcccagaggcgtgccggccagcggcggggggcgcagtgcacacgagggggctggacttcgcctgtgacatctacatctgggcgcccttggccgggacttgtggggtccttctcctgtcactggttatcaccctttactgcaaacggggcagaaagaaactcctgtatatattcaaacaaccatttatgagaccagtacaaactactcaagaggaagatggctgtagctgccgatttccagaagaagaagaaggaggatgtgaactgagagtgaagttcagcaggagcgcagacgcccccgcgtaccagcagggccagaaccagctctataacgagctgaatctaggacgaagagaggagtacgatgttttggacaagagacgtggccgggaccctgagatggggggaaagccgagaaggaagaaccctcaggaaggcctgtacaatgaactgcagaaagataagatggcggaggcctacagtgagattgggatgaaaggcgagcgccggaggggcaaggggcacgatggcctttaccagggtctcagtacagccaccaaggacacctacgacgcccttcacatgcaggccctgccccctcgctaa

SEQ ID NO: 8586 - DNA, 1491 bp, synthetic construct; identical to SEQ ID NO: 8455
  source 1..1491: mol_type = other DNA

SEQ ID NO: 8587 - DNA, 1491 bp, synthetic construct; identical to SEQ ID NO: 8458
  source 1..1491: mol_type = other DNA

SEQ ID NO: 8588 - DNA, 1491 bp, synthetic construct; identical to SEQ ID NO: 8459
  source 1..1491: mol_type = other DNA

SEQ ID NO: 8589 - DNA, 1491 bp, synthetic construct
  source 1..1491: mol_type = other DNA
atggccttaccagtgaccgccttgctcctgccgctggccttgctgctccacgccgccaggccggcccgcagcgagtggcgctacaagggaggcagcggagacatccagatgacacagagccctagcagcctgtctgccagcgtgggagacagagtgaccatcacatgcaaggccagccaggatgtgggcacagccgtggattggtatcagcagaagcctggcaaggcccctaagctgctgatctactgggccagcacaagacacacaggcgtgcccagcagattttctggcagcggctctggcaccgacttcaccctgacaatatccagcctccagcctgaggacttcgccacctactactgccagcagtacaacagctaccctctgaccttcggccagggcaccaaggtggaaatcaaaagaggcggaggcggatctggcggcggaggtagcggtggcggaggatctgaagtgcagctggttgaatcaggtggcggcctggttcaacctggcggatctctgagactgagctgtgccgccagcggctacacctttaccgagtacacaatccactgggtccgacaggcccctggcaaaggacttgagtgggtcgccaacatcaaccccaacaatggcggcaccacctacaaccagaagttcgaggacagattcaccatcagccgggacaacagcaagaacaccctgtacctccagatgaactccctgagagccgaggacaccgccgtgtactattgtgccagaggctggaacttcgactactggggccagggaacactggtcaccgttagctctacgcgtaccacgacgccagcgccgcgaccaccaacaccggcgcccaccatcgcgtcgcagcccctgtccctgcgcccagaggcgtgccggccagcggcggggggcgcagtgcacacgagggggctggacttcgcctgtgacatctacatctgggcgcccttggccgggacttgtggggtccttctcctgtcactggttatcaccctttactgcaaacggggcagaaagaaactcctgtatatattcaaacaaccatttatgagaccagtacaaactactcaagaggaagatggctgtagctgccgatttccagaagaagaagaaggaggatgtgaactgagagtgaagttcagcaggagcgcagacgcccccgcgtaccagcagggccagaaccagctctataacgagctgaatctaggacgaagagaggagtacgatgttttggacaagagacgtggccgggaccctgagatggggggaaagccgagaaggaagaaccctcaggaaggcctgtacaatgaactgcagaaagataagatggcggaggcctacagtgagattgggatgaaaggcgagcgccggaggggcaaggggcacgatggcctttaccagggtctcagtacagccaccaaggacacctacgacgcccttcacatgcaggccctgccccctcgctaa

SEQ ID NO: 8590 - DNA, 1491 bp, synthetic construct
  source 1..1491: mol_type = other DNA
atggccttaccagtgaccgccttgctcctgccgctggccttgctgctccacgccgccaggccggcccgcagcgagtaccgctacaagggaggcagcggagacatccagatgacacagagccctagcagcctgtctgccagcgtgggagacagagtgaccatcacatgcaaggccagccaggatgtgggcacagccgtggattggtatcagcagaagcctggcaaggcccctaagctgctgatctactgggccagcacaagacacacaggcgtgcccagcagattttctggcagcggctctggcaccgacttcaccctgacaatatccagcctccagcctgaggacttcgccacctactactgccagcagtacaacagctaccctctgaccttcggccagggcaccaaggtggaaatcaaaagaggcggaggcggatctggcggcggaggtagcggtggcggaggatctgaagtgcagctggttgaatcaggtggcggcctggttcaacctggcggatctctgagactgagctgtgccgccagcggctacacctttaccgagtacacaatccactgggtccgacaggcccctggcaaaggacttgagtgggtcgccaacatcaaccccaacaatggcggcaccacctacaaccagaagttcgaggacagattcaccatcagccgggacaacagcaagaacaccctgtacctccagatgaactccctgagagccgaggacaccgccgtgtactattgtgccagaggctggaacttcgactactggggccagggaacactggtcaccgttagctctacgcgtaccacgacgccagcgccgcgaccaccaacaccggcgcccaccatcgcgtcgcagcccctgtccctgcgcccagaggcgtgccggccagcggcggggggcgcagtgcacacgagggggctggacttcgcctgtgacatctacatctgggcgcccttggccgggacttgtggggtccttctcctgtcactggttatcaccctttactgcaaacggggcagaaagaaactcctgtatatattcaaacaaccatttatgagaccagtacaaactactcaagaggaagatggctgtagctgccgatttccagaagaagaagaaggaggatgtgaactgagagtgaagttcagcaggagcgcagacgcccccgcgtaccagcagggccagaaccagctctataacgagctgaatctaggacgaagagaggagtacgatgttttggacaagagacgtggccgggaccctgagatggggggaaagccgagaaggaagaaccctcaggaaggcctgtacaatgaactgcagaaagataagatggcggaggcctacagtgagattgggatgaaaggcgagcgccggaggggcaaggggcacgatggcctttaccagggtctcagtacagccaccaaggacacctacgacgcccttcacatgcaggccctgccccctcgctaa

SEQ ID NO: 8591 - DNA, 1491 bp, synthetic construct
  source 1..1491: mol_type = other DNA
atggccttaccagtgaccgccttgctcctgccgctggccttgctgctccacgccgccaggccggcccgcagcgagcgccgctacaagggaggcagcggagacatccagatgacacagagccctagcagcctgtctgccagcgtgggagacagagtgaccatcacatgcaaggccagccaggatgtgggcacagccgtggattggtatcagcagaagcctggcaaggcccctaagctgctgatctactgggccagcacaagacacacaggcgtgcccagcagattttctggcagcggctctggcaccgacttcaccctgacaatatccagcctccagcctgaggacttcgccacctactactgccagcagtacaacagctaccctctgaccttcggccagggcaccaaggtggaaatcaaaagaggcggaggcggatctggcggcggaggtagcggtggcggaggatctgaagtgcagctggttgaatcaggtggcggcctggttcaacctggcggatctctgagactgagctgtgccgccagcggctacacctttaccgagtacacaatccactgggtccgacaggcccctggcaaaggacttgagtgggtcgccaacatcaaccccaacaatggcggcaccacctacaaccagaagttcgaggacagattcaccatcagccgggacaacagcaagaacaccctgtacctccagatgaactccctgagagccgaggacaccgccgtgtactattgtgccagaggctggaacttcgactactggggccagggaacactggtcaccgttagctctacgcgtaccacgacgccagcgccgcgaccaccaacaccggcgcccaccatcgcgtcgcagcccctgtccctgcgcccagaggcgtgccggccagcggcggggggcgcagtgcacacgagggggctggacttcgcctgtgacatctacatctgggcgcccttggccgggacttgtggggtccttctcctgtcactggttatcaccctttactgcaaacggggcagaaagaaactcctgtatatattcaaacaaccatttatgagaccagtacaaactactcaagaggaagatggctgtagctgccgatttccagaagaagaagaaggaggatgtgaactgagagtgaagttcagcaggagcgcagacgcccccgcgtaccagcagggccagaaccagctctataacgagctgaatctaggacgaagagaggagtacgatgttttggacaagagacgtggccgggaccctgagatggggggaaagccgagaaggaagaaccctcaggaaggcctgtacaatgaactgcagaaagataagatggcggaggcctacagtgagattgggatgaaaggcgagcgccggaggggcaaggggcacgatggcctttaccagggtctcagtacagccaccaaggacacctacgacgcccttcacatgcaggccctgccccctcgctaa

SEQ ID NO: 8592 - DNA, 1491 bp, synthetic construct
  source 1..1491: mol_type = other DNA
atggccttaccagtgaccgccttgctcctgccgctggccttgctgctccacgccgccaggccggcccgcagcgaggtgcgctacaagggaggcagcggagacatccagatgacacagagccctagcagcctgtctgccagcgtgggagacagagtgaccatcacatgcaaggccagccaggatgtgggcacagccgtggattggtatcagcagaagcctggcaaggcccctaagctgctgatctactgggccagcacaagacacacaggcgtgcccagcagattttctggcagcggctctggcaccgacttcaccctgacaatatccagcctccagcctgaggacttcgccacctactactgccagcagtacaacagctaccctctgaccttcggccagggcaccaaggtggaaatcaaaagaggcggaggcggatctggcggcggaggtagcggtggcggaggatctgaagtgcagctggttgaatcaggtggcggcctggttcaacctggcggatctctgagactgagctgtgccgccagcggctacacctttaccgagtacacaatccactgggtccgacaggcccctggcaaaggacttgagtgggtcgccaacatcaaccccaacaatggcggcaccacctacaaccagaagttcgaggacagattcaccatcagccgggacaacagcaagaacaccctgtacctccagatgaactccctgagagccgaggacaccgccgtgtactattgtgccagaggctggaacttcgactactggggccagggaacactggtcaccgttagctctacgcgtaccacgacgccagcgccgcgaccaccaacaccggcgcccaccatcgcgtcgcagcccctgtccctgcgcccagaggcgtgccggccagcggcggggggcgcagtgcacacgagggggctggacttcgcctgtgacatctacatctgggcgcccttggccgggacttgtggggtccttctcctgtcactggttatcaccctttactgcaaacggggcagaaagaaactcctgtatatattcaaacaaccatttatgagaccagtacaaactactcaagaggaagatggctgtagctgccgatttccagaagaagaagaaggaggatgtgaactgagagtgaagttcagcaggagcgcagacgcccccgcgtaccagcagggccagaaccagctctataacgagctgaatctaggacgaagagaggagtacgatgttttggacaagagacgtggccgggaccctgagatggggggaaagccgagaaggaagaaccctcaggaaggcctgtacaatgaactgcagaaagataagatggcggaggcctacagtgagattgggatgaaaggcgagcgccggaggggcaaggggcacgatggcctttaccagggtctcagtacagccaccaaggacacctacgacgcccttcacatgcaggccctgccccctcgctaa

SEQ ID NO: 8593 - DNA, 1491 bp, synthetic construct
  source 1..1491: mol_type = other DNA
atggccttaccagtgaccgccttgctcctgccgctggccttgctgctccacgccgccaggccggcccgcatcgaggaccgctacaagggaggcagcggagacatccagatgacacagagccctagcagcctgtctgccagcgtgggagacagagtgaccatcacatgcaaggccagccaggatgtgggcacagccgtggattggtatcagcagaagcctggcaaggcccctaagctgctgatctactgggccagcacaagacacacaggcgtgcccagcagattttctggcagcggctctggcaccgacttcaccctgacaatatccagcctccagcctgaggacttcgccacctactactgccagcagtacaacagctaccctctgaccttcggccagggcaccaaggtggaaatcaaaagaggcggaggcggatctggcggcggaggtagcggtggcggaggatctgaagtgcagctggttgaatcaggtggcggcctggttcaacctggcggatctctgagactgagctgtgccgccagcggctacacctttaccgagtacacaatccactgggtccgacaggcccctggcaaaggacttgagtgggtcgccaacatcaaccccaacaatggcggcaccacctacaaccagaagttcgaggacagattcaccatcagccgggacaacagcaagaacaccctgtacctccagatgaactccctgagagccgaggacaccgccgtgtactattgtgccagaggctggaacttcgactactggggccagggaacactggtcaccgttagctctacgcgtaccacgacgccagcgccgcgaccaccaacaccggcgcccaccatcgcgtcgcagcccctgtccctgcgcccagaggcgtgccggccagcggcggggggcgcagtgcacacgagggggctggacttcgcctgtgacatctacatctgggcgcccttggccgggacttgtggggtccttctcctgtcactggttatcaccctttactgcaaacggggcagaaagaaactcctgtatatattcaaacaaccatttatgagaccagtacaaactactcaagaggaagatggctgtagctgccgatttccagaagaagaagaaggaggatgtgaactgagagtgaagttcagcaggagcgcagacgcccccgcgtaccagcagggccagaaccagctctataacgagctgaatctaggacgaagagaggagtacgatgttttggacaagagacgtggccgggaccctgagatggggggaaagccgagaaggaagaaccctcaggaaggcctgtacaatgaactgcagaaagataagatggcggaggcctacagtgagattgggatgaaaggcgagcgccggaggggcaaggggcacgatggcctttaccagggtctcagtacagccaccaaggacacctacgacgcccttcacatgcaggccctgccccctcgctaa

SEQ ID NO: 8594 - DNA, 1491 bp, synthetic construct
  source 1..1491: mol_type = other DNA
atggccttaccagtgaccgccttgctcctgccgctggccttgctgctccacgccgccaggccggcccgcctggaggaccgctacaagggaggcagcggagacatccagatgacacagagccctagcagcctgtctgccagcgtgggagacagagtgaccatcacatgcaaggccagccaggatgtgggcacagccgtggattggtatcagcagaagcctggcaaggcccctaagctgctgatctactgggccagcacaagacacacaggcgtgcccagcagattttctggcagcggctctggcaccgacttcaccctgacaatatccagcctccagcctgaggacttcgccacctactactgccagcagtacaacagctaccctctgaccttcggccagggcaccaaggtggaaatcaaaagaggcggaggcggatctggcggcggaggtagcggtggcggaggatctgaagtgcagctggttgaatcaggtggcggcctggttcaacctggcggatctctgagactgagctgtgccgccagcggctacacctttaccgagtacacaatccactgggtccgacaggcccctggcaaaggacttgagtgggtcgccaacatcaaccccaacaatggcggcaccacctacaaccagaagttcgaggacagattcaccatcagccgggacaacagcaagaacaccctgtacctccagatgaactccctgagagccgaggacaccgccgtgtactattgtgccagaggctggaacttcgactactggggccagggaacactggtcaccgttagctctacgcgtaccacgacgccagcgccgcgaccaccaacaccggcgcccaccatcgcgtcgcagcccctgtccctgcgcccagaggcgtgccggccagcggcggggggcgcagtgcacacgagggggctggacttcgcctgtgacatctacatctgggcgcccttggccgggacttgtggggtccttctcctgtcactggttatcaccctttactgcaaacggggcagaaagaaactcctgtatatattcaaacaaccatttatgagaccagtacaaactactcaagaggaagatggctgtagctgccgatttccagaagaagaagaaggaggatgtgaactgagagtgaagttcagcaggagcgcagacgcccccgcgtaccagcagggccagaaccagctctataacgagctgaatctaggacgaagagaggagtacgatgttttggacaagagacgtggccgggaccctgagatggggggaaagccgagaaggaagaaccctcaggaaggcctgtacaatgaactgcagaaagataagatggcggaggcctacagtgagattgggatgaaaggcgagcgccggaggggcaaggggcacgatggcctttaccagggtctcagtacagccaccaaggacacctacgacgcccttcacatgcaggccctgccccctcgctaa

SEQ ID NO: 8595 - DNA, 1491 bp, synthetic construct
  source 1..1491: mol_type = other DNA
atggccttaccagtgaccgccttgctcctgccgctggccttgctgctccacgccgccaggccggcccgcatggaggaccgctacaagggaggcagcggagacatccagatgacacagagccctagcagcctgtctgccagcgtgggagacagagtgaccatcacatgcaaggccagccaggatgtgggcacagccgtggattggtatcagcagaagcctggcaaggcccctaagctgctgatctactgggccagcacaagacacacaggcgtgcccagcagattttctggcagcggctctggcaccgacttcaccctgacaatatccagcctccagcctgaggacttcgccacctactactgccagcagtacaacagctaccctctgaccttcggccagggcaccaaggtggaaatcaaaagaggcggaggcggatctggcggcggaggtagcggtggcggaggatctgaagtgcagctggttgaatcaggtggcggcctggttcaacctggcggatctctgagactgagctgtgccgccagcggctacacctttaccgagtacacaatccactgggtccgacaggcccctggcaaaggacttgagtgggtcgccaacatcaaccccaacaatggcggcaccacctacaaccagaagttcgaggacagattcaccatcagccgggacaacagcaagaacaccctgtacctccagatgaactccctgagagccgaggacaccgccgtgtactattgtgccagaggctggaacttcgactactggggccagggaacactggtcaccgttagctctacgcgtaccacgacgccagcgccgcgaccaccaacaccggcgcccaccatcgcgtcgcagcccctgtccctgcgcccagaggcgtgccggccagcggcggggggcgcagtgcacacgagggggctggacttcgcctgtgacatctacatctgggcgcccttggccgggacttgtggggtccttctcctgtcactggttatcaccctttactgcaaacggggcagaaagaaactcctgtatatattcaaacaaccatttatgagaccagtacaaactactcaagaggaagatggctgtagctgccgatttccagaagaagaagaaggaggatgtgaactgagagtgaagttcagcaggagcgcagacgcccccgcgtaccagcagggccagaaccagctctataacgagctgaatctaggacgaagagaggagtacgatgttttggacaagagacgtggccgggaccctgagatggggggaaagccgagaaggaagaaccctcaggaaggcctgtacaatgaactgcagaaagataagatggcggaggcctacagtgagattgggatgaaaggcgagcgccggaggggcaaggggcacgatggcctttaccagggtctcagtacagccaccaaggacacctacgacgcccttcacatgcaggccctgccccctcgctaa

SEQ ID NO: 8596 - DNA, 1491 bp, synthetic construct
  source 1..1491: mol_type = other DNA
atggccttaccagtgaccgccttgctcctgccgctggccttgctgctccacgccgccaggccggcccgcgtggaggaccgctacaagggaggcagcggagacatccagatgacacagagccctagcagcctgtctgccagcgtgggagacagagtgaccatcacatgcaaggccagccaggatgtgggcacagccgtggattggtatcagcagaagcctggcaaggcccctaagctgctgatctactgggccagcacaagacacacaggcgtgcccagcagattttctggcagcggctctggcaccgacttcaccctgacaatatccagcctccagcctgaggacttcgccacctactactgccagcagtacaacagctaccctctgaccttcggccagggcaccaaggtggaaatcaaaagaggcggaggcggatctggcggcggaggtagcggtggcggaggatctgaagtgcagctggttgaatcaggtggcggcctggttcaacctggcggatctctgagactgagctgtgccgccagcggctacacctttaccgagtacacaatccactgggtccgacaggcccctggcaaaggacttgagtgggtcgccaacatcaaccccaacaatggcggcaccacctacaaccagaagttcgaggacagattcaccatcagccgggacaacagcaagaacaccctgtacctccagatgaactccctgagagccgaggacaccgccgtgtactattgtgccagaggctggaacttcgactactggggccagggaacactggtcaccgttagctctacgcgtaccacgacgccagcgccgcgaccaccaacaccggcgcccaccatcgcgtcgcagcccctgtccctgcgcccagaggcgtgccggccagcggcggggggcgcagtgcacacgagggggctggacttcgcctgtgacatctacatctgggcgcccttggccgggacttgtggggtccttctcctgtcactggttatcaccctttactgcaaacggggcagaaagaaactcctgtatatattcaaacaaccatttatgagaccagtacaaactactcaagaggaagatggctgtagctgccgatttccagaagaagaagaaggaggatgtgaactgagagtgaagttcagcaggagcgcagacgcccccgcgtaccagcagggccagaaccagctctataacgagctgaatctaggacgaagagaggagtacgatgttttggacaagagacgtggccgggaccctgagatggggggaaagccgagaaggaagaaccctcaggaaggcctgtacaatgaactgcagaaagataagatggcggaggcctacagtgagattgggatgaaaggcgagcgccggaggggcaaggggcacgatggcctttaccagggtctcagtacagccaccaaggacacctacgacgcccttcacatgcaggccctgccccctcgctaa

SEQ ID NO: 8597 - DNA, 1491 bp, synthetic construct
  source 1..1491: mol_type = other DNA
atggccttaccagtgaccgccttgctcctgccgctggccttgctgctccacgccgccaggccggcccgcgccgaggaccgctacaagggaggcagcggagacatccagatgacacagagccctagcagcctgtctgccagcgtgggagacagagtgaccatcacatgcaaggccagccaggatgtgggcacagccgtggattggtatcagcagaagcctggcaaggcccctaagctgctgatctactgggccagcacaagacacacaggcgtgcccagcagattttctggcagcggctctggcaccgacttcaccctgacaatatccagcctccagcctgaggacttcgccacctactactgccagcagtacaacagctaccctctgaccttcggccagggcaccaaggtggaaatcaaaagaggcggaggcggatctggcggcggaggtagcggtggcggaggatctgaagtgcagctggttgaatcaggtggcggcctggttcaacctggcggatctctgagactgagctgtgccgccagcggctacacctttaccgagtacacaatccactgggtccgacaggcccctggcaaaggacttgagtgggtcgccaacatcaaccccaacaatggcggcaccacctacaaccagaagttcgaggacagattcaccatcagccgggacaacagcaagaacaccctgtacctccagatgaactccctgagagccgaggacaccgccgtgtactattgtgccagaggctggaacttcgactactggggccagggaacactggtcaccgttagctctacgcgtaccacgacgccagcgccgcgaccaccaacaccggcgcccaccatcgcgtcgcagcccctgtccctgcgcccagaggcgtgccggccagcggcggggggcgcagtgcacacgagggggctggacttcgcctgtgacatctacatctgggcgcccttggccgggacttgtggggtccttctcctgtcactggttatcaccctttactgcaaacggggcagaaagaaactcctgtatatattcaaacaaccatttatgagaccagtacaaactactcaagaggaagatggctgtagctgccgatttccagaagaagaagaaggaggatgtgaactgagagtgaagttcagcaggagcgcagacgcccccgcgtaccagcagggccagaaccagctctataacgagctgaatctaggacgaagagaggagtacgatgttttggacaagagacgtggccgggaccctgagatggggggaaagccgagaaggaagaaccctcaggaaggcctgtacaatgaactgcagaaagataagatggcggaggcctacagtgagattgggatgaaaggcgagcgccggaggggcaaggggcacgatggcctttaccagggtctcagtacagccaccaaggacacctacgacgcccttcacatgcaggccctgccccctcgctaa

SEQ ID NO: 8598 - DNA, 1491 bp, synthetic construct
  source 1..1491: mol_type = other DNA
atggccttaccagtgaccgccttgctcctgccgctggccttgctgctccacgccgccaggccggcccgcttcgaggaccgctacaagggaggcagcggagacatccagatgacacagagccctagcagcctgtctgccagcgtgggagacagagtgaccatcacatgcaaggccagccaggatgtgggcacagccgtggattggtatcagcagaagcctggcaaggcccctaagctgctgatctactgggccagcacaagacacacaggcgtgcccagcagattttctggcagcggctctggcaccgacttcaccctgacaatatccagcctccagcctgaggacttcgccacctactactgccagcagtacaacagctaccctctgaccttcggccagggcaccaaggtggaaatcaaaagaggcggaggcggatctggcggcggaggtagcggtggcggaggatctgaagtgcagctggttgaatcaggtggcggcctggttcaacctggcggatctctgagactgagctgtgccgccagcggctacacctttaccgagtacacaatccactgggtccgacaggcccctggcaaaggacttgagtgggtcgccaacatcaaccccaacaatggcggcaccacctacaaccagaagttcgaggacagattcaccatcagccgggacaacagcaagaacaccctgtacctccagatgaactccctgagagccgaggacaccgccgtgtactattgtgccagaggctggaacttcgactactggggccagggaacactggtcaccgttagctctacgcgtaccacgacgccagcgccgcgaccaccaacaccggcgcccaccatcgcgtcgcagcccctgtccctgcgcccagaggcgtgccggccagcggcggggggcgcagtgcacacgagggggctggacttcgcctgtgacatctacatctgggcgcccttggccgggacttgtggggtccttctcctgtcactggttatcaccctttactgcaaacggggcagaaagaaactcctgtatatattcaaacaaccatttatgagaccagtacaaactactcaagaggaagatggctgtagctgccgatttccagaagaagaagaaggaggatgtgaactgagagtgaagttcagcaggagcgcagacgcccccgcgtaccagcagggccagaaccagctctataacgagctgaatctaggacgaagagaggagtacgatgttttggacaagagacgtggccgggaccctgagatggggggaaagccgagaaggaagaaccctcaggaaggcctgtacaatgaactgcagaaagataagatggcggaggcctacagtgagattgggatgaaaggcgagcgccggaggggcaaggggcacgatggcctttaccagggtctcagtacagccaccaaggacacctacgacgcccttcacatgcaggccctgccccctcgctaa

SEQ ID NO: 8599 - DNA, 1491 bp, synthetic construct
  source 1..1491: mol_type = other DNA
atggccttaccagtgaccgccttgctcctgccgctggccttgctgctccacgccgccaggccggcccgccacgaggaccgctacaagggaggcagcggagacatccagatgacacagagccctagcagcctgtctgccagcgtgggagacagagtgaccatcacatgcaaggccagccaggatgtgggcacagccgtggattggtatcagcagaagcctggcaaggcccctaagctgctgatctactgggccagcacaagacacacaggcgtgcccagcagattttctggcagcggctctggcaccgacttcaccctgacaatatccagcctccagcctgaggacttcgccacctactactgccagcagtacaacagctaccctctgaccttcggccagggcaccaaggtggaaatcaaaagaggcggaggcggatctggcggcggaggtagcggtggcggaggatctgaagtgcagctggttgaatcaggtggcggcctggttcaacctggcggatctctgagactgagctgtgccgccagcggctacacctttaccgagtacacaatccactgggtccgacaggcccctggcaaaggacttgagtgggtcgccaacatcaaccccaacaatggcggcaccacctacaaccagaagttcgaggacagattcaccatcagccgggacaacagcaagaacaccctgtacctccagatgaactccctgagagccgaggacaccgccgtgtactattgtgccagaggctggaacttcgactactggggccagggaacactggtcaccgttagctctacgcgtaccacgacgccagcgccgcgaccaccaacaccggcgcccaccatcgcgtcgcagcccctgtccctgcgcccagaggcgtgccggccagcggcggggggcgcagtgcacacgagggggctggacttcgcctgtgacatctacatctgggcgcccttggccgggacttgtggggtccttctcctgtcactggttatcaccctttactgcaaacggggcagaaagaaactcctgtatatattcaaacaaccatttatgagaccagtacaaactactcaagaggaagatggctgtagctgccgatttccagaagaagaagaaggaggatgtgaactgagagtgaagttcagcaggagcgcagacgcccccgcgtaccagcagggccagaaccagctctataacgagctgaatctaggacgaagagaggagtacgatgttttggacaagagacgtggccgggaccctgagatggggggaaagccgagaaggaagaaccctcaggaaggcctgtacaatgaactgcagaaagataagatggcggaggcctacagtgagattgggatgaaaggcgagcgccggaggggcaaggggcacgatggcctttaccagggtctcagtacagccaccaaggacacctacgacgcccttcacatgcaggccctgccccctcgctaa

SEQ ID NO: 8600 - DNA, 1491 bp, synthetic construct
  source 1..1491: mol_type = other DNA
atggccttaccagtgaccgccttgctcctgccgctggccttgctgctccacgccgccaggccggcccgcggcgaggaccgctacaagggaggcagcggagacatccagatgacacagagccctagcagcctgtctgccagcgtgggagacagagtgaccatcacatgcaaggccagccaggatgtgggcacagccgtggattggtatcagcagaagcctggcaaggcccctaagctgctgatctactgggccagcacaagacacacaggcgtgcccagcagattttctggcagcggctctggcaccgacttcaccctgacaatatccagcctccagcctgaggacttcgccacctactactgccagcagtacaacagctaccctctgaccttcggccagggcaccaaggtggaaatcaaaagaggcggaggcggatctggcggcggaggtagcggtggcggaggatctgaagtgcagctggttgaatcaggtggcggcctggttcaacctggcggatctctgagactgagctgtgccgccagcggctacacctttaccgagtacacaatccactgggtccgacaggcccctggcaaaggacttgagtgggtcgccaacatcaaccccaacaatggcggcaccacctacaaccagaagttcgaggacagattcaccatcagccgggacaacagcaagaacaccctgtacctccagatgaactccctgagagccgaggacaccgccgtgtactattgtgccagaggctggaacttcgactactggggccagggaacactggtcaccgttagctctacgcgtaccacgacgccagcgccgcgaccaccaacaccggcgcccaccatcgcgtcgcagcccctgtccctgcgcccagaggcgtgccggccagcggcggggggcgcagtgcacacgagggggctggacttcgcctgtgacatctacatctgggcgcccttggccgggacttgtggggtccttctcctgtcactggttatcaccctttactgcaaacggggcagaaagaaactcctgtatatattcaaacaaccatttatgagaccagtacaaactactcaagaggaagatggctgtagctgccgatttccagaagaagaagaaggaggatgtgaactgagagtgaagttcagcaggagcgcagacgcccccgcgtaccagcagggccagaaccagctctataacgagctgaatctaggacgaagagaggagtacgatgttttggacaagagacgtggccgggaccctgagatggggggaaagccgagaaggaagaaccctcaggaaggcctgtacaatgaactgcagaaagataagatggcggaggcctacagtgagattgggatgaaaggcgagcgccggaggggcaaggggcacgatggcctttaccagggtctcagtacagccaccaaggacacctacgacgcccttcacatgcaggccctgccccctcgctaa

SEQ ID NO: 8601 - DNA, 1491 bp, synthetic construct
  source 1..1491: mol_type = other DNA
atggccttaccagtgaccgccttgctcctgccgctggccttgctgctccacgccgccaggccggcccgcaccgaggaccgctacaagggaggcagcggagacatccagatgacacagagccctagcagcctgtctgccagcgtgggagacagagtgaccatcacatgcaaggccagccaggatgtgggcacagccgtggattggtatcagcagaagcctggcaaggcccctaagctgctgatctactgggccagcacaagacacacaggcgtgcccagcagattttctggcagcggctctggcaccgacttcaccctgacaatatccagcctccagcctgaggacttcgccacctactactgccagcagtacaacagctaccctctgaccttcggccagggcaccaaggtggaaatcaaaagaggcggaggcggatctggcggcggaggtagcggtggcggaggatctgaagtgcagctggttgaatcaggtggcggcctggttcaacctggcggatctctgagactgagctgtgccgccagcggctacacctttaccgagtacacaatccactgggtccgacaggcccctggcaaaggacttgagtgggtcgccaacatcaaccccaacaatggcggcaccacctacaaccagaagttcgaggacagattcaccatcagccgggacaacagcaagaacaccctgtacctccagatgaactccctgagagccgaggacaccgccgtgtactattgtgccagaggctggaacttcgactactggggccagggaacactggtcaccgttagctctacgcgtaccacgacgccagcgccgcgaccaccaacaccggcgcccaccatcgcgtcgcagcccctgtccctgcgcccagaggcgtgccggccagcggcggggggcgcagtgcacacgagggggctggacttcgcctgtgacatctacatctgggcgcccttggccgggacttgtggggtccttctcctgtcactggttatcaccctttactgcaaacggggcagaaagaaactcctgtatatattcaaacaaccatttatgagaccagtacaaactactcaagaggaagatggctgtagctgccgatttccagaagaagaagaaggaggatgtgaactgagagtgaagttcagcaggagcgcagacgcccccgcgtaccagcagggccagaaccagctctataacgagctgaatctaggacgaagagaggagtacgatgttttggacaagagacgtggccgggaccctgagatggggggaaagccgagaaggaagaaccctcaggaaggcctgtacaatgaactgcagaaagataagatggcggaggcctacagtgagattgggatgaaaggcgagcgccggaggggcaaggggcacgatggcctttaccagggtctcagtacagccaccaaggacacctacgacgcccttcacatgcaggccctgccccctcgctaa

SEQ ID NO: 8602 - DNA, 1491 bp, synthetic construct
  source 1..1491: mol_type = other DNA
atggccttaccagtgaccgccttgctcctgccgctggccttgctgctccacgccgccaggccggccagcagcgaggaccgctacaagggaggcagcggagacatccagatgacacagagccctagcagcctgtctgccagcgtgggagacagagtgaccatcacatgcaaggccagccaggatgtgggcacagccgtggattggtatcagcagaagcctggcaaggcccctaagctgctgatctactgggccagcacaagacacacaggcgtgcccagcagattttctggcagcggctctggcaccgacttcaccctgacaatatccagcctccagcctgaggacttcgccacctactactgccagcagtacaacagctaccctctgaccttcggccagggcaccaaggtggaaatcaaaagaggcggaggcggatctggcggcggaggtagcggtggcggaggatctgaagtgcagctggttgaatcaggtggcggcctggttcaacctggcggatctctgagactgagctgtgccgccagcggctacacctttaccgagtacacaatccactgggtccgacaggcccctggcaaaggacttgagtgggtcgccaacatcaaccccaacaatggcggcaccacctacaaccagaagttcgaggacagattcaccatcagccgggacaacagcaagaacaccctgtacctccagatgaactccctgagagccgaggacaccgccgtgtactattgtgccagaggctggaacttcgactactggggccagggaacactggtcaccgttagctctacgcgtaccacgacgccagcgccgcgaccaccaacaccggcgcccaccatcgcgtcgcagcccctgtccctgcgcccagaggcgtgccggccagcggcggggggcgcagtgcacacgagggggctggacttcgcctgtgacatctacatctgggcgcccttggccgggacttgtggggtccttctcctgtcactggttatcaccctttactgcaaacggggcagaaagaaactcctgtatatattcaaacaaccatttatgagaccagtacaaactactcaagaggaagatggctgtagctgccgatttccagaagaagaagaaggaggatgtgaactgagagtgaagttcagcaggagcgcagacgcccccgcgtaccagcagggccagaaccagctctataacgagctgaatctaggacgaagagaggagtacgatgttttggacaagagacgtggccgggaccctgagatggggggaaagccgagaaggaagaaccctcaggaaggcctgtacaatgaactgcagaaagataagatggcggaggcctacagtgagattgggatgaaaggcgagcgccggaggggcaaggggcacgatggcctttaccagggtctcagtacagccaccaaggacacctacgacgcccttcacatgcaggccctgccccctcgctaa

SEQ ID NO: 8603 - DNA, 1491 bp, synthetic construct
  source 1..1491: mol_type = other DNA
atggccttaccagtgaccgccttgctcctgccgctggccttgctgctccacgccgccaggccggcccacagcgaggaccgctacaagggaggcagcggagacatccagatgacacagagccctagcagcctgtctgccagcgtgggagacagagtgaccatcacatgcaaggccagccaggatgtgggcacagccgtggattggtatcagcagaagcctggcaaggcccctaagctgctgatctactgggccagcacaagacacacaggcgtgcccagcagattttctggcagcggctctggcaccgacttcaccctgacaatatccagcctccagcctgaggacttcgccacctactactgccagcagtacaacagctaccctctgaccttcggccagggcaccaaggtggaaatcaaaagaggcggaggcggatctggcggcggaggtagcggtggcggaggatctgaagtgcagctggttgaatcaggtggcggcctggttcaacctggcggatctctgagactgagctgtgccgccagcggctacacctttaccgagtacacaatccactgggtccgacaggcccctggcaaaggacttgagtgggtcgccaacatcaaccccaacaatggcggcaccacctacaaccagaagttcgaggacagattcaccatcagccgggacaacagcaagaacaccctgtacctccagatgaactccctgagagccgaggacaccgccgtgtactattgtgccagaggctggaacttcgactactggggccagggaacactggtcaccgttagctctacgcgtaccacgacgccagcgccgcgaccaccaacaccggcgcccaccatcgcgtcgcagcccctgtccctgcgcccagaggcgtgccggccagcggcggggggcgcagtgcacacgagggggctggacttcgcctgtgacatctacatctgggcgcccttggccgggacttgtggggtccttctcctgtcactggttatcaccctttactgcaaacggggcagaaagaaactcctgtatatattcaaacaaccatttatgagaccagtacaaactactcaagaggaagatggctgtagctgccgatttccagaagaagaagaaggaggatgtgaactgagagtgaagttcagcaggagcgcagacgcccccgcgtaccagcagggccagaaccagctctataacgagctgaatctaggacgaagagaggagtacgatgttttggacaagagacgtggccgggaccctgagatggggggaaagccgagaaggaagaaccctcaggaaggcctgtacaatgaactgcagaaagataagatggcggaggcctacagtgagattgggatgaaaggcgagcgccggaggggcaaggggcacgatggcctttaccagggtctcagtacagccaccaaggacacctacgacgcccttcacatgcaggccctgccccctcgctaa

SEQ ID NO: 8604 - DNA, 1491 bp, synthetic construct
  source 1..1491: mol_type = other DNA
atggccttaccagtgaccgccttgctcctgccgctggccttgctgctccacgccgccaggccggccgacagcgaggaccgctacaagggaggcagcggagacatccagatgacacagagccctagcagcctgtctgccagcgtgggagacagagtgaccatcacatgcaaggccagccaggatgtgggcacagccgtggattggtatcagcagaagcctggcaaggcccctaagctgctgatctactgggccagcacaagacacacaggcgtgcccagcagattttctggcagcggctctggcaccgacttcaccctgacaatatccagcctccagcctgaggacttcgccacctactactgccagcagtacaacagctaccctctgaccttcggccagggcaccaaggtggaaatcaaaagaggcggaggcggatctggcggcggaggtagcggtggcggaggatctgaagtgcagctggttgaatcaggtggcggcctggttcaacctggcggatctctgagactgagctgtgccgccagcggctacacctttaccgagtacacaatccactgggtccgacaggcccctggcaaaggacttgagtgggtcgccaacatcaaccccaacaatggcggcaccacctacaaccagaagttcgaggacagattcaccatcagccgggacaacagcaagaacaccctgtacctccagatgaactccctgagagccgaggacaccgccgtgtactattgtgccagaggctggaacttcgactactggggccagggaacactggtcaccgttagctctacgcgtaccacgacgccagcgccgcgaccaccaacaccggcgcccaccatcgcgtcgcagcccctgtccctgcgcccagaggcgtgccggccagcggcggggggcgcagtgcacacgagggggctggacttcgcctgtgacatctacatctgggcgcccttggccgggacttgtggggtccttctcctgtcactggttatcaccctttactgcaaacggggcagaaagaaactcctgtatatattcaaacaaccatttatgagaccagtacaaactactcaagaggaagatggctgtagctgccgatttccagaagaagaagaaggaggatgtgaactgagagtgaagttcagcaggagcgcagacgcccccgcgtaccagcagggccagaaccagctctataacgagctgaatctaggacgaagagaggagtacgatgttttggacaagagacgtggccgggaccctgagatggggggaaagccgagaaggaagaaccctcaggaaggcctgtacaatgaactgcagaaagataagatggcggaggcctacagtgagattgggatgaaaggcgagcgccggaggggcaaggggcacgatggcctttaccagggtctcagtacagccaccaaggacacctacgacgcccttcacatgcaggccctgccccctcgctaa

SEQ ID NO: 8605 - DNA, 1491 bp, synthetic construct
  source 1..1491: mol_type = other DNA
atggccttaccagtgaccgccttgctcctgccgctggccttgctgctccacgccgccaggccgttcgacagcgaggaccgctacaagggaggcagcggagacatccagatgacacagagccctagcagcctgtctgccagcgtgggagacagagtgaccatcacatgcaaggccagccaggatgtgggcacagccgtggattggtatcagcagaagcctggcaaggcccctaagctgctgatctactgggccagcacaagacacacaggcgtgcccagcagattttctggcagcggctctggcaccgacttcaccctgacaatatccagcctccagcctgaggacttcgccacctactactgccagcagtacaacagctaccctctgaccttcggccagggcaccaaggtggaaatcaaaagaggcggaggcggatctggcggcggaggtagcggtggcggaggatctgaagtgcagctggttgaatcaggtggcggcctggttcaacctggcggatctctgagactgagctgtgccgccagcggctacacctttaccgagtacacaatccactgggtccgacaggcccctggcaaaggacttgagtgggtcgccaacatcaaccccaacaatggcggcaccacctacaaccagaagttcgaggacagattcaccatcagccgggacaacagcaagaacaccctgtacctccagatgaactccctgagagccgaggacaccgccgtgtactattgtgccagaggctggaacttcgactactggggccagggaacactggtcaccgttagctctacgcgtaccacgacgccagcgccgcgaccaccaacaccggcgcccaccatcgcgtcgcagcccctgtccctgcgcccagaggcgtgccggccagcggcggggggcgcagtgcacacgagggggctggacttcgcctgtgacatctacatctgggcgcccttggccgggacttgtggggtccttctcctgtcactggttatcaccctttactgcaaacggggcagaaagaaactcctgtatatattcaaacaaccatttatgagaccagtacaaactactcaagaggaagatggctgtagctgccgatttccagaagaagaagaaggaggatgtgaactgagagtgaagttcagcaggagcgcagacgcccccgcgtaccagcagggccagaaccagctctataacgagctgaatctaggacgaagagaggagtacgatgttttggacaagagacgtggccgggaccctgagatggggggaaagccgagaaggaagaaccctcaggaaggcctgtacaatgaactgcagaaagataagatggcggaggcctacagtgagattgggatgaaaggcgagcgccggaggggcaaggggcacgatggcctttaccagggtctcagtacagccaccaaggacacctacgacgcccttcacatgcaggccctgccccctcgctaa

SEQ ID NO: 8606 - DNA, 1491 bp, synthetic construct; identical to SEQ ID NO: 8556
  source 1..1491: mol_type = other DNA

SEQ ID NO: 8607 - DNA, 1491 bp, synthetic construct
  source 1..1491: mol_type = other DNA
atggccttaccagtgaccgccttgctcctgccgctggccttgctgctccacgccgccaggccggcccccagcgaggaccgctaccgcggaggcagcggagacatccagatgacacagagccctagcagcctgtctgccagcgtgggagacagagtgaccatcacatgcaaggccagccaggatgtgggcacagccgtggattggtatcagcagaagcctggcaaggcccctaagctgctgatctactgggccagcacaagacacacaggcgtgcccagcagattttctggcagcggctctggcaccgacttcaccctgacaatatccagcctccagcctgaggacttcgccacctactactgccagcagtacaacagctaccctctgaccttcggccagggcaccaaggtggaaatcaaaagaggcggaggcggatctggcggcggaggtagcggtggcggaggatctgaagtgcagctggttgaatcaggtggcggcctggttcaacctggcggatctctgagactgagctgtgccgccagcggctacacctttaccgagtacacaatccactgggtccgacaggcccctggcaaaggacttgagtgggtcgccaacatcaaccccaacaatggcggcaccacctacaaccagaagttcgaggacagattcaccatcagccgggacaacagcaagaacaccctgtacctccagatgaactccctgagagccgaggacaccgccgtgtactattgtgccagaggctggaacttcgactactggggccagggaacactggtcaccgttagctctacgcgtaccacgacgccagcgccgcgaccaccaacaccggcgcccaccatcgcgtcgcagcccctgtccctgcgcccagaggcgtgccggccagcggcggggggcgcagtgcacacgagggggctggacttcgcctgtgacatctacatctgggcgcccttggccgggacttgtggggtccttctcctgtcactggttatcaccctttactgcaaacggggcagaaagaaactcctgtatatattcaaacaaccatttatgagaccagtacaaactactcaagaggaagatggctgtagctgccgatttccagaagaagaagaaggaggatgtgaactgagagtgaagttcagcaggagcgcagacgcccccgcgtaccagcagggccagaaccagctctataacgagctgaatctaggacgaagagaggagtacgatgttttggacaagagacgtggccgggaccctgagatggggggaaagccgagaaggaagaaccctcaggaaggcctgtacaatgaactgcagaaagataagatggcggaggcctacagtgagattgggatgaaaggcgagcgccggaggggcaaggggcacgatggcctttaccagggtctcagtacagccaccaaggacacctacgacgcccttcacatgcaggccctgccccctcgctaa

SEQ ID NO: 8608 - DNA, 1491 bp, synthetic construct
  source 1..1491: mol_type = other DNA
atggccttaccagtgaccgccttgctcctgccgctggccttgctgctccacgccgccaggccggccggcagcgaggaccgctaccgcggaggcagcggagacatccagatgacacagagccctagcagcctgtctgccagcgtgggagacagagtgaccatcacatgcaaggccagccaggatgtgggcacagccgtggattggtatcagcagaagcctggcaaggcccctaagctgctgatctactgggccagcacaagacacacaggcgtgcccagcagattttctggcagcggctctggcaccgacttcaccctgacaatatccagcctccagcctgaggacttcgccacctactactgccagcagtacaacagctaccctctgaccttcggccagggcaccaaggtggaaatcaaaagaggcggaggcggatctggcggcggaggtagcggtggcggaggatctgaagtgcagctggttgaatcaggtggcggcctggttcaacctggcggatctctgagactgagctgtgccgccagcggctacacctttaccgagtacacaatccactgggtccgacaggcccctggcaaaggacttgagtgggtcgccaacatcaaccccaacaatggcggcaccacctacaaccagaagttcgaggacagattcaccatcagccgggacaacagcaagaacaccctgtacctccagatgaactccctgagagccgaggacaccgccgtgtactattgtgccagaggctggaacttcgactactggggccagggaacactggtcaccgttagctctacgcgtaccacgacgccagcgccgcgaccaccaacaccggcgcccaccatcgcgtcgcagcccctgtccctgcgcccagaggcgtgccggccagcggcggggggcgcagtgcacacgagggggctggacttcgcctgtgacatctacatctgggcgcccttggccgggacttgtggggtccttctcctgtcactggttatcaccctttactgcaaacggggcagaaagaaactcctgtatatattcaaacaaccatttatgagaccagtacaaactactcaagaggaagatggctgtagctgccgatttccagaagaagaagaaggaggatgtgaactgagagtgaagttcagcaggagcgcagacgcccccgcgtaccagcagggccagaaccagctctataacgagctgaatctaggacgaagagaggagtacgatgttttggacaagagacgtggccgggaccctgagatggggggaaagccgagaaggaagaaccctcaggaaggcctgtacaatgaactgcagaaagataagatggcggaggcctacagtgagattgggatgaaaggcgagcgccggaggggcaaggggcacgatggcctttaccagggtctcagtacagccaccaaggacacctacgacgcccttcacatgcaggccctgccccctcgctaa

SEQ ID NO: 8609 - DNA, 1491 bp, synthetic construct
  source 1..1491: mol_type = other DNA
atggccttaccagtgaccgccttgctcctgccgctggccttgctgctccacgccgccaggccggcccgcagcaaggaccgctaccgcggaggcagcggagacatccagatgacacagagccctagcagcctgtctgccagcgtgggagacagagtgaccatcacatgcaaggccagccaggatgtgggcacagccgtggattggtatcagcagaagcctggcaaggcccctaagctgctgatctactgggccagcacaagacacacaggcgtgcccagcagattttctggcagcggctctggcaccgacttcaccctgacaatatccagcctccagcctgaggacttcgccacctactactgccagcagtacaacagctaccctctgaccttcggccagggcaccaaggtggaaatcaaaagaggcggaggcggatctggcggcggaggtagcggtggcggaggatctgaagtgcagctggttgaatcaggtggcggcctggttcaacctggcggatctctgagactgagctgtgccgccagcggctacacctttaccgagtacacaatccactgggtccgacaggcccctggcaaaggacttgagtgggtcgccaacatcaaccccaacaatggcggcaccacctacaaccagaagttcgaggacagattcaccatcagccgggacaacagcaagaacaccctgtacctccagatgaactccctgagagccgaggacaccgccgtgtactattgtgccagaggctggaacttcgactactggggccagggaacactggtcaccgttagctctacgcgtaccacgacgccagcgccgcgaccaccaacaccggcgcccaccatcgcgtcgcagcccctgtccctgcgcccagaggcgtgccggccagcggcggggggcgcagtgcacacgagggggctggacttcgcctgtgacatctacatctgggcgcccttggccgggacttgtggggtccttctcctgtcactggttatcaccctttactgcaaacggggcagaaagaaactcctgtatatattcaaacaaccatttatgagaccagtacaaactactcaagaggaagatggctgtagctgccgatttccagaagaagaagaaggaggatgtgaactgagagtgaagttcagcaggagcgcagacgcccccgcgtaccagcagggccagaaccagctctataacgagctgaatctaggacgaagagaggagtacgatgttttggacaagagacgtggccgggaccctgagatggggggaaagccgagaaggaagaaccctcaggaaggcctgtacaatgaactgcagaaagataagatggcggaggcctacagtgagattgggatgaaaggcgagcgccggaggggcaaggggcacgatggcctttaccagggtctcagtacagccaccaaggacacctacgacgcccttcacatgcaggccctgccccctcgctaa

SEQ ID NO: 8610 - DNA, 1491 bp, synthetic construct
  source 1..1491: mol_type = other DNA
atggccttaccagtgaccgccttgctcctgccgctggccttgctgctccacgccgccaggccggcccgcagccgcgaccgctaccgcggaggcagcggagacatccagatgacacagagccctagcagcctgtctgccagcgtgggagacagagtgaccatcacatgcaaggccagccaggatgtgggcacagccgtggattggtatcagcagaagcctggcaaggcccctaagctgctgatctactgggccagcacaagacacacaggcgtgcccagcagattttctggcagcggctctggcaccgacttcaccctgacaatatccagcctccagcctgaggacttcgccacctactactgccagcagtacaacagctaccctctgaccttcggccagggcaccaaggtggaaatcaaaagaggcggaggcggatctggcggcggaggtagcggtggcggaggatctgaagtgcagctggttgaatcaggtggcggcctggttcaacctggcggatctctgagactgagctgtgccgccagcggctacacctttaccgagtacacaatccactgggtccgacaggcccctggcaaaggacttgagtgggtcgccaacatcaaccccaacaatggcggcaccacctacaaccagaagttcgaggacagattcaccatcagccgggacaacagcaagaacaccctgtacctccagatgaactccctgagagccgaggacaccgccgtgtactattgtgccagaggctggaacttcgactactggggccagggaacactggtcaccgttagctctacgcgtaccacgacgccagcgccgcgaccaccaacaccggcgcccaccatcgcgtcgcagcccctgtccctgcgcccagaggcgtgccggccagcggcggggggcgcagtgcacacgagggggctggacttcgcctgtgacatctacatctgggcgcccttggccgggacttgtggggtccttctcctgtcactggttatcaccctttactgcaaacggggcagaaagaaactcctgtatatattcaaacaaccatttatgagaccagtacaaactactcaagaggaagatggctgtagctgccgatttccagaagaagaagaaggaggatgtgaactgagagtgaagttcagcaggagcgcagacgcccccgcgtaccagcagggccagaaccagctctataacgagctgaatctaggacgaagagaggagtacgatgttttggacaagagacgtggccgggaccctgagatggggggaaagccgagaaggaagaaccctcaggaaggcctgtacaatgaactgcagaaagataagatggcggaggcctacagtgagattgggatgaaaggcgagcgccggaggggcaaggggcacgatggcctttaccagggtctcagtacagccaccaaggacacctacgacgcccttcacatgcaggccctgccccctcgctaa

SEQ ID NO: 8611 - DNA, 1491 bp, synthetic construct
  source 1..1491: mol_type = other DNA
atggccttaccagtgaccgccttgctcctgccgctggccttgctgctccacgccgccaggccggcccgcagcctggaccgctaccgcggaggcagcggagacatccagatgacacagagccctagcagcctgtctgccagcgtgggagacagagtgaccatcacatgcaaggccagccaggatgtgggcacagccgtggattggtatcagcagaagcctggcaaggcccctaagctgctgatctactgggccagcacaagacacacaggcgtgcccagcagattttctggcagcggctctggcaccgacttcaccctgacaatatccagcctccagcctgaggacttcgccacctactactgccagcagtacaacagctaccctctgaccttcggccagggcaccaaggtggaaatcaaaagaggcggaggcggatctggcggcggaggtagcggtggcggaggatctgaagtgcagctggttgaatcaggtggcggcctggttcaacctggcggatctctgagactgagctgtgccgccagcggctacacctttaccgagtacacaatccactgggtccgacaggcccctggcaaaggacttgagtgggtcgccaacatcaaccccaacaatggcggcaccacctacaaccagaagttcgaggacagattcaccatcagccgggacaacagcaagaacaccctgtacctccagatgaactccctgagagccgaggacaccgccgtgtactattgtgccagaggctggaacttcgactactggggccagggaacactggtcaccgttagctctacgcgtaccacgacgccagcgccgcgaccaccaacaccggcgcccaccatcgcgtcgcagcccctgtccctgcgcccagaggcgtgccggccagcggcggggggcgcagtgcacacgagggggctggacttcgcctgtgacatctacatctgggcgcccttggccgggacttgtggggtccttctcctgtcactggttatcaccctttactgcaaacggggcagaaagaaactcctgtatatattcaaacaaccatttatgagaccagtacaaactactcaagaggaagatggctgtagctgccgatttccagaagaagaagaaggaggatgtgaactgagagtgaagttcagcaggagcgcagacgcccccgcgtaccagcagggccagaaccagctctataacgagctgaatctaggacgaagagaggagtacgatgttttggacaagagacgtggccgggaccctgagatggggggaaagccgagaaggaagaaccctcaggaaggcctgtacaatgaactgcagaaagataagatggcggaggcctacagtgagattgggatgaaaggcgagcgccggaggggcaaggggcacgatggcctttaccagggtctcagtacagccaccaaggacacctacgacgcccttcacatgcaggccctgccccctcgctaa

SEQ ID NO: 8612 - DNA, 1491 bp, synthetic construct
  source 1..1491: mol_type = other DNA
atggccttaccagtgaccgccttgctcctgccgctggccttgctgctccacgccgccaggccggcccgcagccccgaccgctaccgcggaggcagcggagacatccagatgacacagagccctagcagcctgtctgccagcgtgggagacagagtgaccatcacatgcaaggccagccaggatgtgggcacagccgtggattggtatcagcagaagcctggcaaggcccctaagctgctgatctactgggccagcacaagacacacaggcgtgcccagcagattttctggcagcggctctggcaccgacttcaccctgacaatatccagcctccagcctgaggacttcgccacctactactgccagcagtacaacagctaccctctgaccttcggccagggcaccaaggtggaaatcaaaagaggcggaggcggatctggcggcggaggtagcggtggcggaggatctgaagtgcagctggttgaatcaggtggcggcctggttcaacctggcggatctctgagactgagctgtgccgccagcggctacacctttaccgagtacacaatccactgggtccgacaggcccctggcaaaggacttgagtgggtcgccaacatcaaccccaacaatggcggcaccacctacaaccagaagttcgaggacagattcaccatcagccgggacaacagcaagaacaccctgtacctccagatgaactccctgagagccgaggacaccgccgtgtactattgtgccagaggctggaacttcgactactggggccagggaacactggtcaccgttagctctacgcgtaccacgacgccagcgccgcgaccaccaacaccggcgcccaccatcgcgtcgcagcccctgtccctgcgcccagaggcgtgccggccagcggcggggggcgcagtgcacacgagggggctggacttcgcctgtgacatctacatctgggcgcccttggccgggacttgtggggtccttctcctgtcactggttatcaccctttactgcaaacggggcagaaagaaactcctgtatatattcaaacaaccatttatgagaccagtacaaactactcaagaggaagatggctgtagctgccgatttccagaagaagaagaaggaggatgtgaactgagagtgaagttcagcaggagcgcagacgcccccgcgtaccagcagggccagaaccagctctataacgagctgaatctaggacgaagagaggagtacgatgttttggacaagagacgtggccgggaccctgagatggggggaaagccgagaaggaagaaccctcaggaaggcctgtacaatgaactgcagaaagataagatggcggaggcctacagtgagattgggatgaaaggcgagcgccggaggggcaaggggcacgatggcctttaccagggtctcagtacagccaccaaggacacctacgacgcccttcacatgcaggccctgccccctcgctaa

SEQ ID NO: 8613 - DNA, 1491 bp, synthetic construct
  source 1..1491: mol_type = other DNA
atggccttaccagtgaccgccttgctcctgccgctggccttgctgctccacgccgccaggccggcccgccgcgaggaccgctaccgcggaggcagcggagacatccagatgacacagagccctagcagcctgtctgccagcgtgggagacagagtgaccatcacatgcaaggccagccaggatgtgggcacagccgtggattggtatcagcagaagcctggcaaggcccctaagctgctgatctactgggccagcacaagacacacaggcgtgcccagcagattttctggcagcggctctggcaccgacttcaccctgacaatatccagcctccagcctgaggacttcgccacctactactgccagcagtacaacagctaccctctgaccttcggccagggcaccaaggtggaaatcaaaagaggcggaggcggatctggcggcggaggtagcggtggcggaggatctgaagtgcagctggttgaatcaggtggcggcctggttcaacctggcggatctctgagactgagctgtgccgccagcggctacacctttaccgagtacacaatccactgggtccgacaggcccctggcaaaggacttgagtgggtcgccaacatcaaccccaacaatggcggcaccacctacaaccagaagttcgaggacagattcaccatcagccgggacaacagcaagaacaccctgtacctccagatgaactccctgagagccgaggacaccgccgtgtactattgtgccagaggctggaacttcgactactggggccagggaacactggtcaccgttagctctacgcgtaccacgacgccagcgccgcgaccaccaacaccggcgcccaccatcgcgtcgcagcccctgtccctgcgcccagaggcgtgccggccagcggcggggggcgcagtgcacacgagggggctggacttcgcctgtgacatctacatctgggcgcccttggccgggacttgtggggtccttctcctgtcactggttatcaccctttactgcaaacggggcagaaagaaactcctgtatatattcaaacaaccatttatgagaccagtacaaactactcaagaggaagatggctgtagctgccgatttccagaagaagaagaaggaggatgtgaactgagagtgaagttcagcaggagcgcagacgcccccgcgtaccagcagggccagaaccagctctataacgagctgaatctaggacgaagagaggagtacgatgttttggacaagagacgtggccgggaccctgagatggggggaaagccgagaaggaagaaccctcaggaaggcctgtacaatgaactgcagaaagataagatggcggaggcctacagtgagattgggatgaaaggcgagcgccggaggggcaaggggcacgatggcctttaccagggtctcagtacagccaccaaggacacctacgacgcccttcacatgcaggccctgccccctcgctaa

SEQ ID NO: 8614 - DNA, 1491 bp, synthetic construct
  source 1..1491: mol_type = other DNA
atggccttaccagtgaccgccttgctcctgccgctggccttgctgctccacgccgccaggccggcccgccaggaggaccgctaccgcggaggcagcggagacatccagatgacacagagccctagcagcctgtctgccagcgtgggagacagagtgaccatcacatgcaaggccagccaggatgtgggcacagccgtggattggtatcagcagaagcctggcaaggcccctaagctgctgatctactgggccagcacaagacacacaggcgtgcccagcagattttctggcagcggctctggcaccgacttcaccctgacaatatccagcctccagcctgaggacttcgccacctactactgccagcagtacaacagctaccctctgaccttcggccagggcaccaaggtggaaatcaaaagaggcggaggcggatctggcggcggaggtagcggtggcggaggatctgaagtgcagctggttgaatcaggtggcggcctggttcaacctggcggatctctgagactgagctgtgccgccagcggctacacctttaccgagtacacaatccactgggtccgacaggcccctggcaaaggacttgagtgggtcgccaacatcaaccccaacaatggcggcaccacctacaaccagaagttcgaggacagattcaccatcagccgggacaacagcaagaacaccctgtacctccagatgaactccctgagagccgaggacaccgccgtgtactattgtgccagaggctggaacttcgactactggggccagggaacactggtcaccgttagctctacgcgtaccacgacgccagcgccgcgaccaccaacaccggcgcccaccatcgcgtcgcagcccctgtccctgcgcccagaggcgtgccggccagcggcggggggcgcagtgcacacgagggggctggacttcgcctgtgacatctacatctgggcgcccttggccgggacttgtggggtccttctcctgtcactggttatcaccctttactgcaaacggggcagaaagaaactcctgtatatattcaaacaaccatttatgagaccagtacaaactactcaagaggaagatggctgtagctgccgatttccagaagaagaagaaggaggatgtgaactgagagtgaagttcagcaggagcgcagacgcccccgcgtaccagcagggccagaaccagctctataacgagctgaatctaggacgaagagaggagtacgatgttttggacaagagacgtggccgggaccctgagatggggggaaagccgagaaggaagaaccctcaggaaggcctgtacaatgaactgcagaaagataagatggcggaggcctacagtgagattgggatgaaaggcgagcgccggaggggcaaggggcacgatggcctttaccagggtctcagtacagccaccaaggacacctacgacgcccttcacatgcaggccctgccccctcgctaa

SEQ ID NO: 8615 - DNA, 1485 bp, synthetic construct
  source 1..1485: mol_type = other DNA
atggccttaccagtgaccgccttgctcctgccgctggccttgctgctccacgccgccaggccgcgcagcgaggaccgctacggaggcagcggagacatccagatgacacagagccctagcagcctgtctgccagcgtgggagacagagtgaccatcacatgcaaggccagccaggatgtgggcacagccgtggattggtatcagcagaagcctggcaaggcccctaagctgctgatctactgggccagcacaagacacacaggcgtgcccagcagattttctggcagcggctctggcaccgacttcaccctgacaatatccagcctccagcctgaggacttcgccacctactactgccagcagtacaacagctaccctctgaccttcggccagggcaccaaggtggaaatcaaaagaggcggaggcggatctggcggcggaggtagcggtggcggaggatctgaagtgcagctggttgaatcaggtggcggcctggttcaacctggcggatctctgagactgagctgtgccgccagcggctacacctttaccgagtacacaatccactgggtccgacaggcccctggcaaaggacttgagtgggtcgccaacatcaaccccaacaatggcggcaccacctacaaccagaagttcgaggacagattcaccatcagccgggacaacagcaagaacaccctgtacctccagatgaactccctgagagccgaggacaccgccgtgtactattgtgccagaggctggaacttcgactactggggccagggaacactggtcaccgttagctctacgcgtaccacgacgccagcgccgcgaccaccaacaccggcgcccaccatcgcgtcgcagcccctgtccctgcgcccagaggcgtgccggccagcggcggggggcgcagtgcacacgagggggctggacttcgcctgtgacatctacatctgggcgcccttggccgggacttgtggggtccttctcctgtcactggttatcaccctttactgcaaacggggcagaaagaaactcctgtatatattcaaacaaccatttatgagaccagtacaaactactcaagaggaagatggctgtagctgccgatttccagaagaagaagaaggaggatgtgaactgagagtgaagttcagcaggagcgcagacgcccccgcgtaccagcagggccagaaccagctctataacgagctgaatctaggacgaagagaggagtacgatgttttggacaagagacgtggccgggaccctgagatggggggaaagccgagaaggaagaaccctcaggaaggcctgtacaatgaactgcagaaagataagatggcggaggcctacagtgagattgggatgaaaggcgagcgccggaggggcaaggggcacgatggcctttaccagggtctcagtacagccaccaaggacacctacgacgcccttcacatgcaggccctgccccctcgctaa

SEQ ID NO: 8616 - DNA, 1485 bp, synthetic construct
  source 1..1485: mol_type = other DNA
atggccttaccagtgaccgccttgctcctgccgctggccttgctgctccacgccgccaggccgcgcagcgaggaccgcttcggaggcagcggagacatccagatgacacagagccctagcagcctgtctgccagcgtgggagacagagtgaccatcacatgcaaggccagccaggatgtgggcacagccgtggattggtatcagcagaagcctggcaaggcccctaagctgctgatctactgggccagcacaagacacacaggcgtgcccagcagattttctggcagcggctctggcaccgacttcaccctgacaatatccagcctccagcctgaggacttcgccacctactactgccagcagtacaacagctaccctctgaccttcggccagggcaccaaggtggaaatcaaaagaggcggaggcggatctggcggcggaggtagcggtggcggaggatctgaagtgcagctggttgaatcaggtggcggcctggttcaacctggcggatctctgagactgagctgtgccgccagcggctacacctttaccgagtacacaatccactgggtccgacaggcccctggcaaaggacttgagtgggtcgccaacatcaaccccaacaatggcggcaccacctacaaccagaagttcgaggacagattcaccatcagccgggacaacagcaagaacaccctgtacctccagatgaactccctgagagccgaggacaccgccgtgtactattgtgccagaggctggaacttcgactactggggccagggaacactggtcaccgttagctctacgcgtaccacgacgccagcgccgcgaccaccaacaccggcgcccaccatcgcgtcgcagcccctgtccctgcgcccagaggcgtgccggccagcggcggggggcgcagtgcacacgagggggctggacttcgcctgtgacatctacatctgggcgcccttggccgggacttgtggggtccttctcctgtcactggttatcaccctttactgcaaacggggcagaaagaaactcctgtatatattcaaacaaccatttatgagaccagtacaaactactcaagaggaagatggctgtagctgccgatttccagaagaagaagaaggaggatgtgaactgagagtgaagttcagcaggagcgcagacgcccccgcgtaccagcagggccagaaccagctctataacgagctgaatctaggacgaagagaggagtacgatgttttggacaagagacgtggccgggaccctgagatggggggaaagccgagaaggaagaaccctcaggaaggcctgtacaatgaactgcagaaagataagatggcggaggcctacagtgagattgggatgaaaggcgagcgccggaggggcaaggggcacgatggcctttaccagggtctcagtacagccaccaaggacacctacgacgcccttcacatgcaggccctgccccctcgctaa

SEQ ID NO: 8617 - DNA, 1485 bp, synthetic construct
  source 1..1485: mol_type = other DNA
atggccttaccagtgaccgccttgctcctgccgctggccttgctgctccacgccgccaggccgcgcagcgaggaccgccacggaggcagcggagacatccagatgacacagagccctagcagcctgtctgccagcgtgggagacagagtgaccatcacatgcaaggccagccaggatgtgggcacagccgtggattggtatcagcagaagcctggcaaggcccctaagctgctgatctactgggccagcacaagacacacaggcgtgcccagcagattttctggcagcggctctggcaccgacttcaccctgacaatatccagcctccagcctgaggacttcgccacctactactgccagcagtacaacagctaccctctgaccttcggccagggcaccaaggtggaaatcaaaagaggcggaggcggatctggcggcggaggtagcggtggcggaggatctgaagtgcagctggttgaatcaggtggcggcctggttcaacctggcggatctctgagactgagctgtgccgccagcggctacacctttaccgagtacacaatccactgggtccgacaggcccctggcaaaggacttgagtgggtcgccaacatcaaccccaacaatggcggcaccacctacaaccagaagttcgaggacagattcaccatcagccgggacaacagcaagaacaccctgtacctccagatgaactccctgagagccgaggacaccgccgtgtactattgtgccagaggctggaacttcgactactggggccagggaacactggtcaccgttagctctacgcgtaccacgacgccagcgccgcgaccaccaacaccggcgcccaccatcgcgtcgcagcccctgtccctgcgcccagaggcgtgccggccagcggcggggggcgcagtgcacacgagggggctggacttcgcctgtgacatctacatctgggcgcccttggccgggacttgtggggtccttctcctgtcactggttatcaccctttactgcaaacggggcagaaagaaactcctgtatatattcaaacaaccatttatgagaccagtacaaactactcaagaggaagatggctgtagctgccgatttccagaagaagaagaaggaggatgtgaactgagagtgaagttcagcaggagcgcagacgcccccgcgtaccagcagggccagaaccagctctataacgagctgaatctaggacgaagagaggagtacgatgttttggacaagagacgtggccgggaccctgagatggggggaaagccgagaaggaagaaccctcaggaaggcctgtacaatgaactgcagaaagataagatggcggaggcctacagtgagattgggatgaaaggcgagcgccggaggggcaaggggcacgatggcctttaccagggtctcagtacagccaccaaggacacctacgacgcccttcacatgcaggccctgccccctcgctaa

SEQ ID NO: 8618 - DNA, 1485 bp, synthetic construct; identical to SEQ ID NO: 8383
  source 1..1485: mol_type = other DNA

SEQ ID NO: 8619 - DNA, 1485 bp, synthetic construct; identical to SEQ ID NO: 8386
  source 1..1485: mol_type = other DNA

SEQ ID NO: 8620 - DNA, 1485 bp, synthetic construct; identical to SEQ ID NO: 8387
  source 1..1485: mol_type = other DNA

SEQ ID NO: 8621 - DNA, 1485 bp, synthetic construct
  source 1..1485: mol_type = other DNA
atggccttaccagtgaccgccttgctcctgccgctggccttgctgctccacgccgccaggccgcgcagcgagtggcgctacggaggcagcggagacatccagatgacacagagccctagcagcctgtctgccagcgtgggagacagagtgaccatcacatgcaaggccagccaggatgtgggcacagccgtggattggtatcagcagaagcctggcaaggcccctaagctgctgatctactgggccagcacaagacacacaggcgtgcccagcagattttctggcagcggctctggcaccgacttcaccctgacaatatccagcctccagcctgaggacttcgccacctactactgccagcagtacaacagctaccctctgaccttcggccagggcaccaaggtggaaatcaaaagaggcggaggcggatctggcggcggaggtagcggtggcggaggatctgaagtgcagctggttgaatcaggtggcggcctggttcaacctggcggatctctgagactgagctgtgccgccagcggctacacctttaccgagtacacaatccactgggtccgacaggcccctggcaaaggacttgagtgggtcgccaacatcaaccccaacaatggcggcaccacctacaaccagaagttcgaggacagattcaccatcagccgggacaacagcaagaacaccctgtacctccagatgaactccctgagagccgaggacaccgccgtgtactattgtgccagaggctggaacttcgactactggggccagggaacactggtcaccgttagctctacgcgtaccacgacgccagcgccgcgaccaccaacaccggcgcccaccatcgcgtcgcagcccctgtccctgcgcccagaggcgtgccggccagcggcggggggcgcagtgcacacgagggggctggacttcgcctgtgacatctacatctgggcgcccttggccgggacttgtggggtccttctcctgtcactggttatcaccctttactgcaaacggggcagaaagaaactcctgtatatattcaaacaaccatttatgagaccagtacaaactactcaagaggaagatggctgtagctgccgatttccagaagaagaagaaggaggatgtgaactgagagtgaagttcagcaggagcgcagacgcccccgcgtaccagcagggccagaaccagctctataacgagctgaatctaggacgaagagaggagtacgatgttttggacaagagacgtggccgggaccctgagatggggggaaagccgagaaggaagaaccctcaggaaggcctgtacaatgaactgcagaaagataagatggcggaggcctacagtgagattgggatgaaaggcgagcgccggaggggcaaggggcacgatggcctttaccagggtctcagtacagccaccaaggacacctacgacgcccttcacatgcaggccctgccccctcgctaa

SEQ ID NO: 8622 - DNA, 1485 bp, synthetic construct
  source 1..1485: mol_type = other DNA
atggccttaccagtgaccgccttgctcctgccgctggccttgctgctccacgccgccaggccgcgcagcgagtaccgctacggaggcagcggagacatccagatgacacagagccctagcagcctgtctgccagcgtgggagacagagtgaccatcacatgcaaggccagccaggatgtgggcacagccgtggattggtatcagcagaagcctggcaaggcccctaagctgctgatctactgggccagcacaagacacacaggcgtgcccagcagattttctggcagcggctctggcaccgacttcaccctgacaatatccagcctccagcctgaggacttcgccacctactactgccagcagtacaacagctaccctctgaccttcggccagggcaccaaggtggaaatcaaaagaggcggaggcggatctggcggcggaggtagcggtggcggaggatctgaagtgcagctggttgaatcaggtggcggcctggttcaacctggcggatctctgagactgagctgtgccgccagcggctacacctttaccgagtacacaatccactgggtccgacaggcccctggcaaaggacttgagtgggtcgccaacatcaaccccaacaatggcggcaccacctacaaccagaagttcgaggacagattcaccatcagccgggacaacagcaagaacaccctgtacctccagatgaactccctgagagccgaggacaccgccgtgtactattgtgccagaggctggaacttcgactactggggccagggaacactggtcaccgttagctctacgcgtaccacgacgccagcgccgcgaccaccaacaccggcgcccaccatcgcgtcgcagcccctgtccctgcgcccagaggcgtgccggccagcggcggggggcgcagtgcacacgagggggctggacttcgcctgtgacatctacatctgggcgcccttggccgggacttgtggggtccttctcctgtcactggttatcaccctttactgcaaacggggcagaaagaaactcctgtatatattcaaacaaccatttatgagaccagtacaaactactcaagaggaagatggctgtagctgccgatttccagaagaagaagaaggaggatgtgaactgagagtgaagttcagcaggagcgcagacgcccccgcgtaccagcagggccagaaccagctctataacgagctgaatctaggacgaagagaggagtacgatgttttggacaagagacgtggccgggaccctgagatggggggaaagccgagaaggaagaaccctcaggaaggcctgtacaatgaactgcagaaagataagatggcggaggcctacagtgagattgggatgaaaggcgagcgccggaggggcaaggggcacgatggcctttaccagggtctcagtacagccaccaaggacacctacgacgcccttcacatgcaggccctgccccctcgctaa

SEQ ID NO: 8623 - DNA, 1485 bp, synthetic construct
  source 1..1485: mol_type = other DNA
atggccttaccagtgaccgccttgctcctgccgctggccttgctgctccacgccgccaggccgcgcagcgagcgccgctacggaggcagcggagacatccagatgacacagagccctagcagcctgtctgccagcgtgggagacagagtgaccatcacatgcaaggccagccaggatgtgggcacagccgtggattggtatcagcagaagcctggcaaggcccctaagctgctgatctactgggccagcacaagacacacaggcgtgcccagcagattttctggcagcggctctggcaccgacttcaccctgacaatatccagcctccagcctgaggacttcgccacctactactgccagcagtacaacagctaccctctgaccttcggccagggcaccaaggtggaaatcaaaagaggcggaggcggatctggcggcggaggtagcggtggcggaggatctgaagtgcagctggttgaatcaggtggcggcctggttcaacctggcggatctctgagactgagctgtgccgccagcggctacacctttaccgagtacacaatccactgggtccgacaggcccctggcaaaggacttgagtgggtcgccaacatcaaccccaacaatggcggcaccacctacaaccagaagttcgaggacagattcaccatcagccgggacaacagcaagaacaccctgtacctccagatgaactccctgagagccgaggacaccgccgtgtactattgtgccagaggctggaacttcgactactggggccagggaacactggtcaccgttagctctacgcgtaccacgacgccagcgccgcgaccaccaacaccggcgcccaccatcgcgtcgcagcccctgtccctgcgcccagaggcgtgccggccagcggcggggggcgcagtgcacacgagggggctggacttcgcctgtgacatctacatctgggcgcccttggccgggacttgtggggtccttctcctgtcactggttatcaccctttactgcaaacggggcagaaagaaactcctgtatatattcaaacaaccatttatgagaccagtacaaactactcaagaggaagatggctgtagctgccgatttccagaagaagaagaaggaggatgtgaactgagagtgaagttcagcaggagcgcagacgcccccgcgtaccagcagggccagaaccagctctataacgagctgaatctaggacgaagagaggagtacgatgttttggacaagagacgtggccgggaccctgagatggggggaaagccgagaaggaagaaccctcaggaaggcctgtacaatgaactgcagaaagataagatggcggaggcctacagtgagattgggatgaaaggcgagcgccggaggggcaaggggcacgatggcctttaccagggtctcagtacagccaccaaggacacctacgacgcccttcacatgcaggccctgccccctcgctaa

SEQ ID NO: 8624 - DNA, 1485 bp, synthetic construct
  source 1..1485: mol_type = other DNA
atggccttaccagtgaccgccttgctcctgccgctggccttgctgctccacgccgccaggccgcgcagcgaggtgcgctacggaggcagcggagacatccagatgacacagagccctagcagcctgtctgccagcgtgggagacagagtgaccatcacatgcaaggccagccaggatgtgggcacagccgtggattggtatcagcagaagcctggcaaggcccctaagctgctgatctactgggccagcacaagacacacaggcgtgcccagcagattttctggcagcggctctggcaccgacttcaccctgacaatatccagcctccagcctgaggacttcgccacctactactgccagcagtacaacagctaccctctgaccttcggccagggcaccaaggtggaaatcaaaagaggcggaggcggatctggcggcggaggtagcggtggcggaggatctgaagtgcagctggttgaatcaggtggcggcctggttcaacctggcggatctctgagactgagctgtgccgccagcggctacacctttaccgagtacacaatccactgggtccgacaggcccctggcaaaggacttgagtgggtcgccaacatcaaccccaacaatggcggcaccacctacaaccagaagttcgaggacagattcaccatcagccgggacaacagcaagaacaccctgtacctccagatgaactccctgagagccgaggacaccgccgtgtactattgtgccagaggctggaacttcgactactggggccagggaacactggtcaccgttagctctacgcgtaccacgacgccagcgccgcgaccaccaacaccggcgcccaccatcgcgtcgcagcccctgtccctgcgcccagaggcgtgccggccagcggcggggggcgcagtgcacacgagggggctggacttcgcctgtgacatctacatctgggcgcccttggccgggacttgtggggtccttctcctgtcactggttatcaccctttactgcaaacggggcagaaagaaactcctgtatatattcaaacaaccatttatgagaccagtacaaactactcaagaggaagatggctgtagctgccgatttccagaagaagaagaaggaggatgtgaactgagagtgaagttcagcaggagcgcagacgcccccgcgtaccagcagggccagaaccagctctataacgagctgaatctaggacgaagagaggagtacgatgttttggacaagagacgtggccgggaccctgagatggggggaaagccgagaaggaagaaccctcaggaaggcctgtacaatgaactgcagaaagataagatggcggaggcctacagtgagattgggatgaaaggcgagcgccggaggggcaaggggcacgatggcctttaccagggtctcagtacagccaccaaggacacctacgacgcccttcacatgcaggccctgccccctcgctaa

SEQ ID NO: 8625 - DNA, 1485 bp, synthetic construct
  source 1..1485: mol_type = other DNA
atggccttaccagtgaccgccttgctcctgccgctggccttgctgctccacgccgccaggccgcgcatcgaggaccgctacggaggcagcggagacatccagatgacacagagccctagcagcctgtctgccagcgtgggagacagagtgaccatcacatgcaaggccagccaggatgtgggcacagccgtggattggtatcagcagaagcctggcaaggcccctaagctgctgatctactgggccagcacaagacacacaggcgtgcccagcagattttctggcagcggctctggcaccgacttcaccctgacaatatccagcctccagcctgaggacttcgccacctactactgccagcagtacaacagctaccctctgaccttcggccagggcaccaaggtggaaatcaaaagaggcggaggcggatctggcggcggaggtagcggtggcggaggatctgaagtgcagctggttgaatcaggtggcggcctggttcaacctggcggatctctgagactgagctgtgccgccagcggctacacctttaccgagtacacaatccactgggtccgacaggcccctggcaaaggacttgagtgggtcgccaacatcaaccccaacaatggcggcaccacctacaaccagaagttcgaggacagattcaccatcagccgggacaacagcaagaacaccctgtacctccagatgaactccctgagagccgaggacaccgccgtgtactattgtgccagaggctggaacttcgactactggggccagggaacactggtcaccgttagctctacgcgtaccacgacgccagcgccgcgaccaccaacaccggcgcccaccatcgcgtcgcagcccctgtccctgcgcccagaggcgtgccggccagcggcggggggcgcagtgcacacgagggggctggacttcgcctgtgacatctacatctgggcgcccttggccgggacttgtggggtccttctcctgtcactggttatcaccctttactgcaaacggggcagaaagaaactcctgtatatattcaaacaaccatttatgagaccagtacaaactactcaagaggaagatggctgtagctgccgatttccagaagaagaagaaggaggatgtgaactgagagtgaagttcagcaggagcgcagacgcccccgcgtaccagcagggccagaaccagctctataacgagctgaatctaggacgaagagaggagtacgatgttttggacaagagacgtggccgggaccctgagatggggggaaagccgagaaggaagaaccctcaggaaggcctgtacaatgaactgcagaaagataagatggcggaggcctacagtgagattgggatgaaaggcgagcgccggaggggcaaggggcacgatggcctttaccagggtctcagtacagccaccaaggacacctacgacgcccttcacatgcaggccctgccccctcgctaa

SEQ ID NO: 8626 - DNA, 1485 bp, synthetic construct
  source 1..1485: mol_type = other DNA
atggccttaccagtgaccgccttgctcctgccgctggccttgctgctccacgccgccaggccgcgcctggaggaccgctacggaggcagcggagacatccagatgacacagagccctagcagcctgtctgccagcgtgggagacagagtgaccatcacatgcaaggccagccaggatgtgggcacagccgtggattggtatcagcagaagcctggcaaggcccctaagctgctgatctactgggccagcacaagacacacaggcgtgcccagcagattttctggcagcggctctggcaccgacttcaccctgacaatatccagcctccagcctgaggacttcgccacctactactgccagcagtacaacagctaccctctgaccttcggccagggcaccaaggtggaaatcaaaagaggcggaggcggatctggcggcggaggtagcggtggcggaggatctgaagtgcagctggttgaatcaggtggcggcctggttcaacctggcggatctctgagactgagctgtgccgccagcggctacacctttaccgagtacacaatccactgggtccgacaggcccctggcaaaggacttgagtgggtcgccaacatcaaccccaacaatggcggcaccacctacaaccagaagttcgaggacagattcaccatcagccgggacaacagcaagaacaccctgtacctccagatgaactccctgagagccgaggacaccgccgtgtactattgtgccagaggctggaacttcgactactggggccagggaacactggtcaccgttagctctacgcgtaccacgacgccagcgccgcgaccaccaacaccggcgcccaccatcgcgtcgcagcccctgtccctgcgcccagaggcgtgccggccagcggcggggggcgcagtgcacacgagggggctggacttcgcctgtgacatctacatctgggcgcccttggccgggacttgtggggtccttctcctgtcactggttatcaccctttactgcaaacggggcagaaagaaactcctgtatatattcaaacaaccatttatgagaccagtacaaactactcaagaggaagatggctgtagctgccgatttccagaagaagaagaaggaggatgtgaactgagagtgaagttcagcaggagcgcagacgcccccgcgtaccagcagggccagaaccagctctataacgagctgaatctaggacgaagagaggagtacgatgttttggacaagagacgtggccgggaccctgagatggggggaaagccgagaaggaagaaccctcaggaaggcctgtacaatgaactgcagaaagataagatggcggaggcctacagtgagattgggatgaaaggcgagcgccggaggggcaaggggcacgatggcctttaccagggtctcagtacagccaccaaggacacctacgacgcccttcacatgcaggccctgccccctcgctaa

SEQ ID NO: 8627 - DNA, 1485 bp, synthetic construct
  source 1..1485: mol_type = other DNA
atggccttaccagtgaccgccttgctcctgccgctggccttgctgctccacgccgccaggccgcgcatggaggaccgctacggaggcagcggagacatccagatgacacagagccctagcagcctgtctgccagcgtgggagacagagtgaccatcacatgcaaggccagccaggatgtgggcacagccgtggattggtatcagcagaagcctggcaaggcccctaagctgctgatctactgggccagcacaagacacacaggcgtgcccagcagattttctggcagcggctctggcaccgacttcaccctgacaatatccagcctccagcctgaggacttcgccacctactactgccagcagtacaacagctaccctctgaccttcggccagggcaccaaggtggaaatcaaaagaggcggaggcggatctggcggcggaggtagcggtggcggaggatctgaagtgcagctggttgaatcaggtggcggcctggttcaacctggcggatctctgagactgagctgtgccgccagcggctacacctttaccgagtacacaatccactgggtccgacaggcccctggcaaaggacttgagtgggtcgccaacatcaaccccaacaatggcggcaccacctacaaccagaagttcgaggacagattcaccatcagccgggacaacagcaagaacaccctgtacctccagatgaactccctgagagccgaggacaccgccgtgtactattgtgccagaggctggaacttcgactactggggccagggaacactggtcaccgttagctctacgcgtaccacgacgccagcgccgcgaccaccaacaccggcgcccaccatcgcgtcgcagcccctgtccctgcgcccagaggcgtgccggccagcggcggggggcgcagtgcacacgagggggctggacttcgcctgtgacatctacatctgggcgcccttggccgggacttgtggggtccttctcctgtcactggttatcaccctttactgcaaacggggcagaaagaaactcctgtatatattcaaacaaccatttatgagaccagtacaaactactcaagaggaagatggctgtagctgccgatttccagaagaagaagaaggaggatgtgaactgagagtgaagttcagcaggagcgcagacgcccccgcgtaccagcagggccagaaccagctctataacgagctgaatctaggacgaagagaggagtacgatgttttggacaagagacgtggccgggaccctgagatggggggaaagccgagaaggaagaaccctcaggaaggcctgtacaatgaactgcagaaagataagatggcggaggcctacagtgagattgggatgaaaggcgagcgccggaggggcaaggggcacgatggcctttaccagggtctcagtacagccaccaaggacacctacgacgcccttcacatgcaggccctgccccctcgctaa

SEQ ID NO: 8628 - DNA, 1485 bp, synthetic construct
  source 1..1485: mol_type = other DNA
atggccttaccagtgaccgccttgctcctgccgctggccttgctgctccacgccgccaggccgcgcgtggaggaccgctacggaggcagcggagacatccagatgacacagagccctagcagcctgtctgccagcgtgggagacagagtgaccatcacatgcaaggccagccaggatgtgggcacagccgtggattggtatcagcagaagcctggcaaggcccctaagctgctgatctactgggccagcacaagacacacaggcgtgcccagcagattttctggcagcggctctggcaccgacttcaccctgacaatatccagcctccagcctgaggacttcgccacctactactgccagcagtacaacagctaccctctgaccttcggccagggcaccaaggtggaaatcaaaagaggcggaggcggatctggcggcggaggtagcggtggcggaggatctgaagtgcagctggttgaatcaggtggcggcctggttcaacctggcggatctctgagactgagctgtgccgccagcggctacacctttaccgagtacacaatccactgggtccgacaggcccctggcaaaggacttgagtgggtcgccaacatcaaccccaacaatggcggcaccacctacaaccagaagttcgaggacagattcaccatcagccgggacaacagcaagaacaccctgtacctccagatgaactccctgagagccgaggacaccgccgtgtactattgtgccagaggctggaacttcgactactggggccagggaacactggtcaccgttagctctacgcgtaccacgacgccagcgccgcgaccaccaacaccggcgcccaccatcgcgtcgcagcccctgtccctgcgcccagaggcgtgccggccagcggcggggggcgcagtgcacacgagggggctggacttcgcctgtgacatctacatctgggcgcccttggccgggacttgtggggtccttctcctgtcactggttatcaccctttactgcaaacggggcagaaagaaactcctgtatatattcaaacaaccatttatgagaccagtacaaactactcaagaggaagatggctgtagctgccgatttccagaagaagaagaaggaggatgtgaactgagagtgaagttcagcaggagcgcagacgcccccgcgtaccagcagggccagaaccagctctataacgagctgaatctaggacgaagagaggagtacgatgttttggacaagagacgtggccgggaccctgagatggggggaaagccgagaaggaagaaccctcaggaaggcctgtacaatgaactgcagaaagataagatggcggaggcctacagtgagattgggatgaaaggcgagcgccggaggggcaaggggcacgatggcctttaccagggtctcagtacagccaccaaggacacctacgacgcccttcacatgcaggccctgccccctcgctaa

SEQ ID NO: 8629 - DNA, 1485 bp, synthetic construct
  source 1..1485: mol_type = other DNA
atggccttaccagtgaccgccttgctcctgccgctggccttgctgctccacgccgccaggccgcgcgccgaggaccgctacggaggcagcggagacatccagatgacacagagccctagcagcctgtctgccagcgtgggagacagagtgaccatcacatgcaaggccagccaggatgtgggcacagccgtggattggtatcagcagaagcctggcaaggcccctaagctgctgatctactgggccagcacaagacacacaggcgtgcccagcagattttctggcagcggctctggcaccgacttcaccctgacaatatccagcctccagcctgaggacttcgccacctactactgccagcagtacaacagctaccctctgaccttcggccagggcaccaaggtggaaatcaaaagaggcggaggcggatctggcggcggaggtagcggtggcggaggatctgaagtgcagctggttgaatcaggtggcggcctggttcaacctggcggatctctgagactgagctgtgccgccagcggctacacctttaccgagtacacaatccactgggtccgacaggcccctggcaaaggacttgagtgggtcgccaacatcaaccccaacaatggcggcaccacctacaaccagaagttcgaggacagattcaccatcagccgggacaacagcaagaacaccctgtacctccagatgaactccctgagagccgaggacaccgccgtgtactattgtgccagaggctggaacttcgactactggggccagggaacactggtcaccgttagctctacgcgtaccacgacgccagcgccgcgaccaccaacaccggcgcccaccatcgcgtcgcagcccctgtccctgcgcccagaggcgtgccggccagcggcggggggcgcagtgcacacgagggggctggacttcgcctgtgacatctacatctgggcgcccttggccgggacttgtggggtccttctcctgtcactggttatcaccctttactgcaaacggggcagaaagaaactcctgtatatattcaaacaaccatttatgagaccagtacaaactactcaagaggaagatggctgtagctgccgatttccagaagaagaagaaggaggatgtgaactgagagtgaagttcagcaggagcgcagacgcccccgcgtaccagcagggccagaaccagctctataacgagctgaatctaggacgaagagaggagtacgatgttttggacaagagacgtggccgggaccctgagatggggggaaagccgagaaggaagaaccctcaggaaggcctgtacaatgaactgcagaaagataagatggcggaggcctacagtgagattgggatgaaaggcgagcgccggaggggcaaggggcacgatggcctttaccagggtctcagtacagccaccaaggacacctacgacgcccttcacatgcaggccctgccccctcgctaa

SEQ ID NO: 8630 - DNA, 1485 bp, synthetic construct
  source 1..1485: mol_type = other DNA
atggccttaccagtgaccgccttgctcctgccgctggccttgctgctccacgccgccaggccgcgcttcgaggaccgctacggaggcagcggagacatccagatgacacagagccctagcagcctgtctgccagcgtgggagacagagtgaccatcacatgcaaggccagccaggatgtgggcacagccgtggattggtatcagcagaagcctggcaaggcccctaagctgctgatctactgggccagcacaagacacacaggcgtgcccagcagattttctggcagcggctctggcaccgacttcaccctgacaatatccagcctccagcctgaggacttcgccacctactactgccagcagtacaacagctaccctctgaccttcggccagggcaccaaggtggaaatcaaaagaggcggaggcggatctggcggcggaggtagcggtggcggaggatctgaagtgcagctggttgaatcaggtggcggcctggttcaacctggcggatctctgagactgagctgtgccgccagcggctacacctttaccgagtacacaatccactgggtccgacaggcccctggcaaaggacttgagtgggtcgccaacatcaaccccaacaatggcggcaccacctacaaccagaagttcgaggacagattcaccatcagccgggacaacagcaagaacaccctgtacctccagatgaactccctgagagccgaggacaccgccgtgtactattgtgccagaggctggaacttcgactactggggccagggaacactggtcaccgttagctctacgcgtaccacgacgccagcgccgcgaccaccaacaccggcgcccaccatcgcgtcgcagcccctgtccctgcgcccagaggcgtgccggccagcggcggggggcgcagtgcacacgagggggctggacttcgcctgtgacatctacatctgggcgcccttggccgggacttgtggggtccttctcctgtcactggttatcaccctttactgcaaacggggcagaaagaaactcctgtatatattcaaacaaccatttatgagaccagtacaaactactcaagaggaagatggctgtagctgccgatttccagaagaagaagaaggaggatgtgaactgagagtgaagttcagcaggagcgcagacgcccccgcgtaccagcagggccagaaccagctctataacgagctgaatctaggacgaagagaggagtacgatgttttggacaagagacgtggccgggaccctgagatggggggaaagccgagaaggaagaaccctcaggaaggcctgtacaatgaactgcagaaagataagatggcggaggcctacagtgagattgggatgaaaggcgagcgccggaggggcaaggggcacgatggcctttaccagggtctcagtacagccaccaaggacacctacgacgcccttcacatgcaggccctgccccctcgctaa

SEQ ID NO: 8631 - DNA, 1485 bp, synthetic construct
  source 1..1485: mol_type = other DNA
atggccttaccagtgaccgccttgctcctgccgctggccttgctgctccacgccgccaggccgcgccacgaggaccgctacggaggcagcggagacatccagatgacacagagccctagcagcctgtctgccagcgtgggagacagagtgaccatcacatgcaaggccagccaggatgtgggcacagccgtggattggtatcagcagaagcctggcaaggcccctaagctgctgatctactgggccagcacaagacacacaggcgtgcccagcagattttctggcagcggctctggcaccgacttcaccctgacaatatccagcctccagcctgaggacttcgccacctactactgccagcagtacaacagctaccctctgaccttcggccagggcaccaaggtggaaatcaaaagaggcggaggcggatctggcggcggaggtagcggtggcggaggatctgaagtgcagctggttgaatcaggtggcggcctggttcaacctggcggatctctgagactgagctgtgccgccagcggctacacctttaccgagtacacaatccactgggtccgacaggcccctggcaaaggacttgagtgggtcgccaacatcaaccccaacaatggcggcaccacctacaaccagaagttcgaggacagattcaccatcagccgggacaacagcaagaacaccctgtacctccagatgaactccctgagagccgaggacaccgccgtgtactattgtgccagaggctggaacttcgactactggggccagggaacactggtcaccgttagctctacgcgtaccacgacgccagcgccgcgaccaccaacaccggcgcccaccatcgcgtcgcagcccctgtccctgcgcccagaggcgtgccggccagcggcggggggcgcagtgcacacgagggggctggacttcgcctgtgacatctacatctgggcgcccttggccgggacttgtggggtccttctcctgtcactggttatcaccctttactgcaaacggggcagaaagaaactcctgtatatattcaaacaaccatttatgagaccagtacaaactactcaagaggaagatggctgtagctgccgatttccagaagaagaagaaggaggatgtgaactgagagtgaagttcagcaggagcgcagacgcccccgcgtaccagcagggccagaaccagctctataacgagctgaatctaggacgaagagaggagtacgatgttttggacaagagacgtggccgggaccctgagatggggggaaagccgagaaggaagaaccctcaggaaggcctgtacaatgaactgcagaaagataagatggcggaggcctacagtgagattgggatgaaaggcgagcgccggaggggcaaggggcacgatggcctttaccagggtctcagtacagccaccaaggacacctacgacgcccttcacatgcaggccctgccccctcgctaa

SEQ ID NO: 8632 - DNA, 1485 bp, synthetic construct
  source 1..1485: mol_type = other DNA
atggccttaccagtgaccgccttgctcctgccgctggccttgctgctccacgccgccaggccgcgcggcgaggaccgctacggaggcagcggagacatccagatgacacagagccctagcagcctgtctgccagcgtgggagacagagtgaccatcacatgcaaggccagccaggatgtgggcacagccgtggattggtatcagcagaagcctggcaaggcccctaagctgctgatctactgggccagcacaagacacacaggcgtgcccagcagattttctggcagcggctctggcaccgacttcaccctgacaatatccagcctccagcctgaggacttcgccacctactactgccagcagtacaacagctaccctctgaccttcggccagggcaccaaggtggaaatcaaaagaggcggaggcggatctggcggcggaggtagcggtggcggaggatctgaagtgcagctggttgaatcaggtggcggcctggttcaacctggcggatctctgagactgagctgtgccgccagcggctacacctttaccgagtacacaatccactgggtccgacaggcccctggcaaaggacttgagtgggtcgccaacatcaaccccaacaatggcggcaccacctacaaccagaagttcgaggacagattcaccatcagccgggacaacagcaagaacaccctgtacctccagatgaactccctgagagccgaggacaccgccgtgtactattgtgccagaggctggaacttcgactactggggccagggaacactggtcaccgttagctctacgcgtaccacgacgccagcgccgcgaccaccaacaccggcgcccaccatcgcgtcgcagcccctgtccctgcgcccagaggcgtgccggccagcggcggggggcgcagtgcacacgagggggctggacttcgcctgtgacatctacatctgggcgcccttggccgggacttgtggggtccttctcctgtcactggttatcaccctttactgcaaacggggcagaaagaaactcctgtatatattcaaacaaccatttatgagaccagtacaaactactcaagaggaagatggctgtagctgccgatttccagaagaagaagaaggaggatgtgaactgagagtgaagttcagcaggagcgcagacgcccccgcgtaccagcagggccagaaccagctctataacgagctgaatctaggacgaagagaggagtacgatgttttggacaagagacgtggccgggaccctgagatggggggaaagccgagaaggaagaaccctcaggaaggcctgtacaatgaactgcagaaagataagatggcggaggcctacagtgagattgggatgaaaggcgagcgccggaggggcaaggggcacgatggcctttaccagggtctcagtacagccaccaaggacacctacgacgcccttcacatgcaggccctgccccctcgctaa

SEQ ID NO: 8633 - DNA, 1485 bp, synthetic construct
  source 1..1485: mol_type = other DNA
atggccttaccagtgaccgccttgctcctgccgctggccttgctgctccacgccgccaggccgcgcaccgaggaccgctacggaggcagcggagacatccagatgacacagagccctagcagcctgtctgccagcgtgggagacagagtgaccatcacatgcaaggccagccaggatgtgggcacagccgtggattggtatcagcagaagcctggcaaggcccctaagctgctgatctactgggccagcacaagacacacaggcgtgcccagcagattttctggcagcggctctggcaccgacttcaccctgacaatatccagcctccagcctgaggacttcgccacctactactgccagcagtacaacagctaccctctgaccttcggccagggcaccaaggtggaaatcaaaagaggcggaggcggatctggcggcggaggtagcggtggcggaggatctgaagtgcagctggttgaatcaggtggcggcctggttcaacctggcggatctctgagactgagctgtgccgccagcggctacacctttaccgagtacacaatccactgggtccgacaggcccctggcaaaggacttgagtgggtcgccaacatcaaccccaacaatggcggcaccacctacaaccagaagttcgaggacagattcaccatcagccgggacaacagcaagaacaccctgtacctccagatgaactccctgagagccgaggacaccgccgtgtactattgtgccagaggctggaacttcgactactggggccagggaacactggtcaccgttagctctacgcgtaccacgacgccagcgccgcgaccaccaacaccggcgcccaccatcgcgtcgcagcccctgtccctgcgcccagaggcgtgccggccagcggcggggggcgcagtgcacacgagggggctggacttcgcctgtgacatctacatctgggcgcccttggccgggacttgtggggtccttctcctgtcactggttatcaccctttactgcaaacggggcagaaagaaactcctgtatatattcaaacaaccatttatgagaccagtacaaactactcaagaggaagatggctgtagctgccgatttccagaagaagaagaaggaggatgtgaactgagagtgaagttcagcaggagcgcagacgcccccgcgtaccagcagggccagaaccagctctataacgagctgaatctaggacgaagagaggagtacgatgttttggacaagagacgtggccgggaccctgagatggggggaaagccgagaaggaagaaccctcaggaaggcctgtacaatgaactgcagaaagataagatggcggaggcctacagtgagattgggatgaaaggcgagcgccggaggggcaaggggcacgatggcctttaccagggtctcagtacagccaccaaggacacctacgacgcccttcacatgcaggccctgccccctcgctaa

SEQ ID NO: 8634 - DNA, 1485 bp, synthetic construct
  source 1..1485: mol_type = other DNA
atggccttaccagtgaccgccttgctcctgccgctggccttgctgctccacgccgccaggccgagcagcgaggaccgctacggaggcagcggagacatccagatgacacagagccctagcagcctgtctgccagcgtgggagacagagtgaccatcacatgcaaggccagccaggatgtgggcacagccgtggattggtatcagcagaagcctggcaaggcccctaagctgctgatctactgggccagcacaagacacacaggcgtgcccagcagattttctggcagcggctctggcaccgacttcaccctgacaatatccagcctccagcctgaggacttcgccacctactactgccagcagtacaacagctaccctctgaccttcggccagggcaccaaggtggaaatcaaaagaggcggaggcggatctggcggcggaggtagcggtggcggaggatctgaagtgcagctggttgaatcaggtggcggcctggttcaacctggcggatctctgagactgagctgtgccgccagcggctacacctttaccgagtacacaatccactgggtccgacaggcccctggcaaaggacttgagtgggtcgccaacatcaaccccaacaatggcggcaccacctacaaccagaagttcgaggacagattcaccatcagccgggacaacagcaagaacaccctgtacctccagatgaactccctgagagccgaggacaccgccgtgtactattgtgccagaggctggaacttcgactactggggccagggaacactggtcaccgttagctctacgcgtaccacgacgccagcgccgcgaccaccaacaccggcgcccaccatcgcgtcgcagcccctgtccctgcgcccagaggcgtgccggccagcggcggggggcgcagtgcacacgagggggctggacttcgcctgtgacatctacatctgggcgcccttggccgggacttgtggggtccttctcctgtcactggttatcaccctttactgcaaacggggcagaaagaaactcctgtatatattcaaacaaccatttatgagaccagtacaaactactcaagaggaagatggctgtagctgccgatttccagaagaagaagaaggaggatgtgaactgagagtgaagttcagcaggagcgcagacgcccccgcgtaccagcagggccagaaccagctctataacgagctgaatctaggacgaagagaggagtacgatgttttggacaagagacgtggccgggaccctgagatggggggaaagccgagaaggaagaaccctcaggaaggcctgtacaatgaactgcagaaagataagatggcggaggcctacagtgagattgggatgaaaggcgagcgccggaggggcaaggggcacgatggcctttaccagggtctcagtacagccaccaaggacacctacgacgcccttcacatgcaggccctgccccctcgctaa

SEQ ID NO: 8635 - DNA, 1485 bp, synthetic construct
  source 1..1485: mol_type = other DNA
atggccttaccagtgaccgccttgctcctgccgctggccttgctgctccacgccgccaggccgcacagcgaggaccgctacggaggcagcggagacatccagatgacacagagccctagcagcctgtctgccagcgtgggagacagagtgaccatcacatgcaaggccagccaggatgtgggcacagccgtggattggtatcagcagaagcctggcaaggcccctaagctgctgatctactgggccagcacaagacacacaggcgtgcccagcagattttctggcagcggctctggcaccgacttcaccctgacaatatccagcctccagcctgaggacttcgccacctactactgccagcagtacaacagctaccctctgaccttcggccagggcaccaaggtggaaatcaaaagaggcggaggcggatctggcggcggaggtagcggtggcggaggatctgaagtgcagctggttgaatcaggtggcggcctggttcaacctggcggatctctgagactgagctgtgccgccagcggctacacctttaccgagtacacaatccactgggtccgacaggcccctggcaaaggacttgagtgggtcgccaacatcaaccccaacaatggcggcaccacctacaaccagaagttcgaggacagattcaccatcagccgggacaacagcaagaacaccctgtacctccagatgaactccctgagagccgaggacaccgccgtgtactattgtgccagaggctggaacttcgactactggggccagggaacactggtcaccgttagctctacgcgtaccacgacgccagcgccgcgaccaccaacaccggcgcccaccatcgcgtcgcagcccctgtccctgcgcccagaggcgtgccggccagcggcggggggcgcagtgcacacgagggggctggacttcgcctgtgacatctacatctgggcgcccttggccgggacttgtggggtccttctcctgtcactggttatcaccctttactgcaaacggggcagaaagaaactcctgtatatattcaaacaaccatttatgagaccagtacaaactactcaagaggaagatggctgtagctgccgatttccagaagaagaagaaggaggatgtgaactgagagtgaagttcagcaggagcgcagacgcccccgcgtaccagcagggccagaaccagctctataacgagctgaatctaggacgaagagaggagtacgatgttttggacaagagacgtggccgggaccctgagatggggggaaagccgagaaggaagaaccctcaggaaggcctgtacaatgaactgcagaaagataagatggcggaggcctacagtgagattgggatgaaaggcgagcgccggaggggcaaggggcacgatggcctttaccagggtctcagtacagccaccaaggacacctacgacgcccttcacatgcaggccctgccccctcgctaa

SEQ ID NO: 8636 - DNA, 1485 bp, synthetic construct
  source 1..1485: mol_type = other DNA
atggccttaccagtgaccgccttgctcctgccgctggccttgctgctccacgccgccaggccggacagcgaggaccgctacggaggcagcggagacatccagatgacacagagccctagcagcctgtctgccagcgtgggagacagagtgaccatcacatgcaaggccagccaggatgtgggcacagccgtggattggtatcagcagaagcctggcaaggcccctaagctgctgatctactgggccagcacaagacacacaggcgtgcccagcagattttctggcagcggctctggcaccgacttcaccctgacaatatccagcctccagcctgaggacttcgccacctactactgccagcagtacaacagctaccctctgaccttcggccagggcaccaaggtggaaatcaaaagaggcggaggcggatctggcggcggaggtagcggtggcggaggatctgaagtgcagctggttgaatcaggtggcggcctggttcaacctggcggatctctgagactgagctgtgccgccagcggctacacctttaccgagtacacaatccactgggtccgacaggcccctggcaaaggacttgagtgggtcgccaacatcaaccccaacaatggcggcaccacctacaaccagaagttcgaggacagattcaccatcagccgggacaacagcaagaacaccctgtacctccagatgaactccctgagagccgaggacaccgccgtgtactattgtgccagaggctggaacttcgactactggggccagggaacactggtcaccgttagctctacgcgtaccacgacgccagcgccgcgaccaccaacaccggcgcccaccatcgcgtcgcagcccctgtccctgcgcccagaggcgtgccggccagcggcggggggcgcagtgcacacgagggggctggacttcgcctgtgacatctacatctgggcgcccttggccgggacttgtggggtccttctcctgtcactggttatcaccctttactgcaaacggggcagaaagaaactcctgtatatattcaaacaaccatttatgagaccagtacaaactactcaagaggaagatggctgtagctgccgatttccagaagaagaagaaggaggatgtgaactgagagtgaagttcagcaggagcgcagacgcccccgcgtaccagcagggccagaaccagctctataacgagctgaatctaggacgaagagaggagtacgatgttttggacaagagacgtggccgggaccctgagatggggggaaagccgagaaggaagaaccctcaggaaggcctgtacaatgaactgcagaaagataagatggcggaggcctacagtgagattgggatgaaaggcgagcgccggaggggcaaggggcacgatggcctttaccagggtctcagtacagccaccaaggacacctacgacgcccttcacatgcaggccctgccccctcgctaa

SEQ ID NO: 8637 - DNA, 1485 bp, synthetic construct
  source 1..1485: mol_type = other DNA
atggccttaccagtgaccgccttgctcctgccgctggccttgctgctccacgccgccaggccgttcagcgaggaccgctacggaggcagcggagacatccagatgacacagagccctagcagcctgtctgccagcgtgggagacagagtgaccatcacatgcaaggccagccaggatgtgggcacagccgtggattggtatcagcagaagcctggcaaggcccctaagctgctgatctactgggccagcacaagacacacaggcgtgcccagcagattttctggcagcggctctggcaccgacttcaccctgacaatatccagcctccagcctgaggacttcgccacctactactgccagcagtacaacagctaccctctgaccttcggccagggcaccaaggtggaaatcaaaagaggcggaggcggatctggcggcggaggtagcggtggcggaggatctgaagtgcagctggttgaatcaggtggcggcctggttcaacctggcggatctctgagactgagctgtgccgccagcggctacacctttaccgagtacacaatccactgggtccgacaggcccctggcaaaggacttgagtgggtcgccaacatcaaccccaacaatggcggcaccacctacaaccagaagttcgaggacagattcaccatcagccgggacaacagcaagaacaccctgtacctccagatgaactccctgagagccgaggacaccgccgtgtactattgtgccagaggctggaacttcgactactggggccagggaacactggtcaccgttagctctacgcgtaccacgacgccagcgccgcgaccaccaacaccggcgcccaccatcgcgtcgcagcccctgtccctgcgcccagaggcgtgccggccagcggcggggggcgcagtgcacacgagggggctggacttcgcctgtgacatctacatctgggcgcccttggccgggacttgtggggtccttctcctgtcactggttatcaccctttactgcaaacggggcagaaagaaactcctgtatatattcaaacaaccatttatgagaccagtacaaactactcaagaggaagatggctgtagctgccgatttccagaagaagaagaaggaggatgtgaactgagagtgaagttcagcaggagcgcagacgcccccgcgtaccagcagggccagaaccagctctataacgagctgaatctaggacgaagagaggagtacgatgttttggacaagagacgtggccgggaccctgagatggggggaaagccgagaaggaagaaccctcaggaaggcctgtacaatgaactgcagaaagataagatggcggaggcctacagtgagattgggatgaaaggcgagcgccggaggggcaaggggcacgatggcctttaccagggtctcagtacagccaccaaggacacctacgacgcccttcacatgcaggccctgccccctcgctaa

SEQ ID NO: 8638 - DNA, 1491 bp, synthetic construct; identical to SEQ ID NO: 8548
  source 1..1491: mol_type = other DNA

SEQ ID NO: 8639 - DNA, 1491 bp, synthetic construct; identical to SEQ ID NO: 8552
  source 1..1491: mol_type = other DNA

SEQ ID NO: 8640 - DNA, 1491 bp, synthetic construct; identical to SEQ ID NO: 8435
  source 1..1491: mol_type = other DNA

SEQ ID NO: 8641 - DNA, 1491 bp, synthetic construct; identical to SEQ ID NO: 8438
  source 1..1491: mol_type = other DNA

SEQ ID NO: 8642 - DNA, 1500 bp, synthetic construct
  source 1..1500: mol_type = other DNA
atggccttaccagtgaccgccttgctcctgccgctggccttgctgctccacgccgccaggccggcccgcagcgaggaccgctaccgcaaccactacggaggcagcggagacatccagatgacacagagccctagcagcctgtctgccagcgtgggagacagagtgaccatcacatgcaaggccagccaggatgtgggcacagccgtggattggtatcagcagaagcctggcaaggcccctaagctgctgatctactgggccagcacaagacacacaggcgtgcccagcagattttctggcagcggctctggcaccgacttcaccctgacaatatccagcctccagcctgaggacttcgccacctactactgccagcagtacaacagctaccctctgaccttcggccagggcaccaaggtggaaatcaaaagaggcggaggcggatctggcggcggaggtagcggtggcggaggatctgaagtgcagctggttgaatcaggtggcggcctggttcaacctggcggatctctgagactgagctgtgccgccagcggctacacctttaccgagtacacaatccactgggtccgacaggcccctggcaaaggacttgagtgggtcgccaacatcaaccccaacaatggcggcaccacctacaaccagaagttcgaggacagattcaccatcagccgggacaacagcaagaacaccctgtacctccagatgaactccctgagagccgaggacaccgccgtgtactattgtgccagaggctggaacttcgactactggggccagggaacactggtcaccgttagctctacgcgtaccacgacgccagcgccgcgaccaccaacaccggcgcccaccatcgcgtcgcagcccctgtccctgcgcccagaggcgtgccggccagcggcggggggcgcagtgcacacgagggggctggacttcgcctgtgacatctacatctgggcgcccttggccgggacttgtggggtccttctcctgtcactggttatcaccctttactgcaaacggggcagaaagaaactcctgtatatattcaaacaaccatttatgagaccagtacaaactactcaagaggaagatggctgtagctgccgatttccagaagaagaagaaggaggatgtgaactgagagtgaagttcagcaggagcgcagacgcccccgcgtaccagcagggccagaaccagctctataacgagctgaatctaggacgaagagaggagtacgatgttttggacaagagacgtggccgggaccctgagatggggggaaagccgagaaggaagaaccctcaggaaggcctgtacaatgaactgcagaaagataagatggcggaggcctacagtgagattgggatgaaaggcgagcgccggaggggcaaggggcacgatggcctttaccagggtctcagtacagccaccaaggacacctacgacgcccttcacatgcaggccctgccccctcgctaa

SEQ ID NO: 8643 - DNA, 1500 bp, synthetic construct
  source 1..1500: mol_type = other DNA
atggccttaccagtgaccgccttgctcctgccgctggccttgctgctccacgccgccaggccggcccgcagcgaggaccgctaccgcaaccaccccggaggcagcggagacatccagatgacacagagccctagcagcctgtctgccagcgtgggagacagagtgaccatcacatgcaaggccagccaggatgtgggcacagccgtggattggtatcagcagaagcctggcaaggcccctaagctgctgatctactgggccagcacaagacacacaggcgtgcccagcagattttctggcagcggctctggcaccgacttcaccctgacaatatccagcctccagcctgaggacttcgccacctactactgccagcagtacaacagctaccctctgaccttcggccagggcaccaaggtggaaatcaaaagaggcggaggcggatctggcggcggaggtagcggtggcggaggatctgaagtgcagctggttgaatcaggtggcggcctggttcaacctggcggatctctgagactgagctgtgccgccagcggctacacctttaccgagtacacaatccactgggtccgacaggcccctggcaaaggacttgagtgggtcgccaacatcaaccccaacaatggcggcaccacctacaaccagaagttcgaggacagattcaccatcagccgggacaacagcaagaacaccctgtacctccagatgaactccctgagagccgaggacaccgccgtgtactattgtgccagaggctggaacttcgactactggggccagggaacactggtcaccgttagctctacgcgtaccacgacgccagcgccgcgaccaccaacaccggcgcccaccatcgcgtcgcagcccctgtccctgcgcccagaggcgtgccggccagcggcggggggcgcagtgcacacgagggggctggacttcgcctgtgacatctacatctgggcgcccttggccgggacttgtggggtccttctcctgtcactggttatcaccctttactgcaaacggggcagaaagaaactcctgtatatattcaaacaaccatttatgagaccagtacaaactactcaagaggaagatggctgtagctgccgatttccagaagaagaagaaggaggatgtgaactgagagtgaagttcagcaggagcgcagacgcccccgcgtaccagcagggccagaaccagctctataacgagctgaatctaggacgaagagaggagtacgatgttttggacaagagacgtggccgggaccctgagatggggggaaagccgagaaggaagaaccctcaggaaggcctgtacaatgaactgcagaaagataagatggcggaggcctacagtgagattgggatgaaaggcgagcgccggaggggcaaggggcacgatggcctttaccagggtctcagtacagccaccaaggacacctacgacgcccttcacatgcaggccctgccccctcgctaa

SEQ ID NO: 8644 - DNA, 1500 bp, synthetic construct
  source 1..1500: mol_type = other DNA
atggccttaccagtgaccgccttgctcctgccgctggccttgctgctccacgccgccaggccggcccgcagcgaggaccgctaccgcaaccacgccggaggcagcggagacatccagatgacacagagccctagcagcctgtctgccagcgtgggagacagagtgaccatcacatgcaaggccagccaggatgtgggcacagccgtggattggtatcagcagaagcctggcaaggcccctaagctgctgatctactgggccagcacaagacacacaggcgtgcccagcagattttctggcagcggctctggcaccgacttcaccctgacaatatccagcctccagcctgaggacttcgccacctactactgccagcagtacaacagctaccctctgaccttcggccagggcaccaaggtggaaatcaaaagaggcggaggcggatctggcggcggaggtagcggtggcggaggatctgaagtgcagctggttgaatcaggtggcggcctggttcaacctggcggatctctgagactgagctgtgccgccagcggctacacctttaccgagtacacaatccactgggtccgacaggcccctggcaaaggacttgagtgggtcgccaacatcaaccccaacaatggcggcaccacctacaaccagaagttcgaggacagattcaccatcagccgggacaacagcaagaacaccctgtacctccagatgaactccctgagagccgaggacaccgccgtgtactattgtgccagaggctggaacttcgactactggggccagggaacactggtcaccgttagctctacgcgtaccacgacgccagcgccgcgaccaccaacaccggcgcccaccatcgcgtcgcagcccctgtccctgcgcccagaggcgtgccggccagcggcggggggcgcagtgcacacgagggggctggacttcgcctgtgacatctacatctgggcgcccttggccgggacttgtggggtccttctcctgtcactggttatcaccctttactgcaaacggggcagaaagaaactcctgtatatattcaaacaaccatttatgagaccagtacaaactactcaagaggaagatggctgtagctgccgatttccagaagaagaagaaggaggatgtgaactgagagtgaagttcagcaggagcgcagacgcccccgcgtaccagcagggccagaaccagctctataacgagctgaatctaggacgaagagaggagtacgatgttttggacaagagacgtggccgggaccctgagatggggggaaagccgagaaggaagaaccctcaggaaggcctgtacaatgaactgcagaaagataagatggcggaggcctacagtgagattgggatgaaaggcgagcgccggaggggcaaggggcacgatggcctttaccagggtctcagtacagccaccaaggacacctacgacgcccttcacatgcaggccctgccccctcgctaa

SEQ ID NO: 8645 - DNA, 1500 bp, synthetic construct; identical to SEQ ID NO: 8421
  source 1..1500: mol_type = other DNA

SEQ ID NO: 8646 - DNA, 1500 bp, synthetic construct
  source 1..1500: mol_type = other DNA
atggccttaccagtgaccgccttgctcctgccgctggccttgctgctccacgccgccaggccggcccgcagcgaggaccgctaccgcaaccgccacggaggcagcggagacatccagatgacacagagccctagcagcctgtctgccagcgtgggagacagagtgaccatcacatgcaaggccagccaggatgtgggcacagccgtggattggtatcagcagaagcctggcaaggcccctaagctgctgatctactgggccagcacaagacacacaggcgtgcccagcagattttctggcagcggctctggcaccgacttcaccctgacaatatccagcctccagcctgaggacttcgccacctactactgccagcagtacaacagctaccctctgaccttcggccagggcaccaaggtggaaatcaaaagaggcggaggcggatctggcggcggaggtagcggtggcggaggatctgaagtgcagctggttgaatcaggtggcggcctggttcaacctggcggatctctgagactgagctgtgccgccagcggctacacctttaccgagtacacaatccactgggtccgacaggcccctggcaaaggacttgagtgggtcgccaacatcaaccccaacaatggcggcaccacctacaaccagaagttcgaggacagattcaccatcagccgggacaacagcaagaacaccctgtacctccagatgaactccctgagagccgaggacaccgccgtgtactattgtgccagaggctggaacttcgactactggggccagggaacactggtcaccgttagctctacgcgtaccacgacgccagcgccgcgaccaccaacaccggcgcccaccatcgcgtcgcagcccctgtccctgcgcccagaggcgtgccggccagcggcggggggcgcagtgcacacgagggggctggacttcgcctgtgacatctacatctgggcgcccttggccgggacttgtggggtccttctcctgtcactggttatcaccctttactgcaaacggggcagaaagaaactcctgtatatattcaaacaaccatttatgagaccagtacaaactactcaagaggaagatggctgtagctgccgatttccagaagaagaagaaggaggatgtgaactgagagtgaagttcagcaggagcgcagacgcccccgcgtaccagcagggccagaaccagctctataacgagctgaatctaggacgaagagaggagtacgatgttttggacaagagacgtggccgggaccctgagatggggggaaagccgagaaggaagaaccctcaggaaggcctgtacaatgaactgcagaaagataagatggcggaggcctacagtgagattgggatgaaaggcgagcgccggaggggcaaggggcacgatggcctttaccagggtctcagtacagccaccaaggacacctacgacgcccttcacatgcaggccctgccccctcgctaa

SEQ ID NO: 8647 - DNA, 1500 bp, synthetic construct
  source 1..1500: mol_type = other DNA
atggccttaccagtgaccgccttgctcctgccgctggccttgctgctccacgccgccaggccggcccgcagcgaggaccgctaccgcaacctgcgcggaggcagcggagacatccagatgacacagagccctagcagcctgtctgccagcgtgggagacagagtgaccatcacatgcaaggccagccaggatgtgggcacagccgtggattggtatcagcagaagcctggcaaggcccctaagctgctgatctactgggccagcacaagacacacaggcgtgcccagcagattttctggcagcggctctggcaccgacttcaccctgacaatatccagcctccagcctgaggacttcgccacctactactgccagcagtacaacagctaccctctgaccttcggccagggcaccaaggtggaaatcaaaagaggcggaggcggatctggcggcggaggtagcggtggcggaggatctgaagtgcagctggttgaatcaggtggcggcctggttcaacctggcggatctctgagactgagctgtgccgccagcggctacacctttaccgagtacacaatccactgggtccgacaggcccctggcaaaggacttgagtgggtcgccaacatcaaccccaacaatggcggcaccacctacaaccagaagttcgaggacagattcaccatcagccgggacaacagcaagaacaccctgtacctccagatgaactccctgagagccgaggacaccgccgtgtactattgtgccagaggctggaacttcgactactggggccagggaacactggtcaccgttagctctacgcgtaccacgacgccagcgccgcgaccaccaacaccggcgcccaccatcgcgtcgcagcccctgtccctgcgcccagaggcgtgccggccagcggcggggggcgcagtgcacacgagggggctggacttcgcctgtgacatctacatctgggcgcccttggccgggacttgtggggtccttctcctgtcactggttatcaccctttactgcaaacggggcagaaagaaactcctgtatatattcaaacaaccatttatgagaccagtacaaactactcaagaggaagatggctgtagctgccgatttccagaagaagaagaaggaggatgtgaactgagagtgaagttcagcaggagcgcagacgcccccgcgtaccagcagggccagaaccagctctataacgagctgaatctaggacgaagagaggagtacgatgttttggacaagagacgtggccgggaccctgagatggggggaaagccgagaaggaagaaccctcaggaaggcctgtacaatgaactgcagaaagataagatggcggaggcctacagtgagattgggatgaaaggcgagcgccggaggggcaaggggcacgatggcctttaccagggtctcagtacagccaccaaggacacctacgacgcccttcacatgcaggccctgccccctcgctaa

SEQ ID NO: 8648 - DNA, 1500 bp, synthetic construct
  source 1..1500: mol_type = other DNA
atggccttaccagtgaccgccttgctcctgccgctggccttgctgctccacgccgccaggccggcccgcagcgaggaccgctaccgcaaccgcctgggaggcagcggagacatccagatgacacagagccctagcagcctgtctgccagcgtgggagacagagtgaccatcacatgcaaggccagccaggatgtgggcacagccgtggattggtatcagcagaagcctggcaaggcccctaagctgctgatctactgggccagcacaagacacacaggcgtgcccagcagattttctggcagcggctctggcaccgacttcaccctgacaatatccagcctccagcctgaggacttcgccacctactactgccagcagtacaacagctaccctctgaccttcggccagggcaccaaggtggaaatcaaaagaggcggaggcggatctggcggcggaggtagcggtggcggaggatctgaagtgcagctggttgaatcaggtggcggcctggttcaacctggcggatctctgagactgagctgtgccgccagcggctacacctttaccgagtacacaatccactgggtccgacaggcccctggcaaaggacttgagtgggtcgccaacatcaaccccaacaatggcggcaccacctacaaccagaagttcgaggacagattcaccatcagccgggacaacagcaagaacaccctgtacctccagatgaactccctgagagccgaggacaccgccgtgtactattgtgccagaggctggaacttcgactactggggccagggaacactggtcaccgttagctctacgcgtaccacgacgccagcgccgcgaccaccaacaccggcgcccaccatcgcgtcgcagcccctgtccctgcgcccagaggcgtgccggccagcggcggggggcgcagtgcacacgagggggctggacttcgcctgtgacatctacatctgggcgcccttggccgggacttgtggggtccttctcctgtcactggttatcaccctttactgcaaacggggcagaaagaaactcctgtatatattcaaacaaccatttatgagaccagtacaaactactcaagaggaagatggctgtagctgccgatttccagaagaagaagaaggaggatgtgaactgagagtgaagttcagcaggagcgcagacgcccccgcgtaccagcagggccagaaccagctctataacgagctgaatctaggacgaagagaggagtacgatgttttggacaagagacgtggccgggaccctgagatggggggaaagccgagaaggaagaaccctcaggaaggcctgtacaatgaactgcagaaagataagatggcggaggcctacagtgagattgggatgaaaggcgagcgccggaggggcaaggggcacgatggcctttaccagggtctcagtacagccaccaaggacacctacgacgcccttcacatgcaggccctgccccctcgctaa

SEQ ID NO: 8649 - DNA, 1500 bp, synthetic construct
  source 1..1500: mol_type = other DNA
atggccttaccagtgaccgccttgctcctgccgctggccttgctgctccacgccgccaggccggcccgcagcgaggaccgctaccgcaaccccaccggaggcagcggagacatccagatgacacagagccctagcagcctgtctgccagcgtgggagacagagtgaccatcacatgcaaggccagccaggatgtgggcacagccgtggattggtatcagcagaagcctggcaaggcccctaagctgctgatctactgggccagcacaagacacacaggcgtgcccagcagattttctggcagcggctctggcaccgacttcaccctgacaatatccagcctccagcctgaggacttcgccacctactactgccagcagtacaacagctaccctctgaccttcggccagggcaccaaggtggaaatcaaaagaggcggaggcggatctggcggcggaggtagcggtggcggaggatctgaagtgcagctggttgaatcaggtggcggcctggttcaacctggcggatctctgagactgagctgtgccgccagcggctacacctttaccgagtacacaatccactgggtccgacaggcccctggcaaaggacttgagtgggtcgccaacatcaaccccaacaatggcggcaccacctacaaccagaagttcgaggacagattcaccatcagccgggacaacagcaagaacaccctgtacctccagatgaactccctgagagccgaggacaccgccgtgtactattgtgccagaggctggaacttcgactactggggccagggaacactggtcaccgttagctctacgcgtaccacgacgccagcgccgcgaccaccaacaccggcgcccaccatcgcgtcgcagcccctgtccctgcgcccagaggcgtgccggccagcggcggggggcgcagtgcacacgagggggctggacttcgcctgtgacatctacatctgggcgcccttggccgggacttgtggggtccttctcctgtcactggttatcaccctttactgcaaacggggcagaaagaaactcctgtatatattcaaacaaccatttatgagaccagtacaaactactcaagaggaagatggctgtagctgccgatttccagaagaagaagaaggaggatgtgaactgagagtgaagttcagcaggagcgcagacgcccccgcgtaccagcagggccagaaccagctctataacgagctgaatctaggacgaagagaggagtacgatgttttggacaagagacgtggccgggaccctgagatggggggaaagccgagaaggaagaaccctcaggaaggcctgtacaatgaactgcagaaagataagatggcggaggcctacagtgagattgggatgaaaggcgagcgccggaggggcaaggggcacgatggcctttaccagggtctcagtacagccaccaaggacacctacgacgcccttcacatgcaggccctgccccctcgctaa

SEQ ID NO: 8650 - DNA, 1500 bp, synthetic construct
  source 1..1500: mol_type = other DNA
atggccttaccagtgaccgccttgctcctgccgctggccttgctgctccacgccgccaggccggcccgcagcgaggaccgctaccgcaaccacagcggaggcagcggagacatccagatgacacagagccctagcagcctgtctgccagcgtgggagacagagtgaccatcacatgcaaggccagccaggatgtgggcacagccgtggattggtatcagcagaagcctggcaaggcccctaagctgctgatctactgggccagcacaagacacacaggcgtgcccagcagattttctggcagcggctctggcaccgacttcaccctgacaatatccagcctccagcctgaggacttcgccacctactactgccagcagtacaacagctaccctctgaccttcggccagggcaccaaggtggaaatcaaaagaggcggaggcggatctggcggcggaggtagcggtggcggaggatctgaagtgcagctggttgaatcaggtggcggcctggttcaacctggcggatctctgagactgagctgtgccgccagcggctacacctttaccgagtacacaatccactgggtccgacaggcccctggcaaaggacttgagtgggtcgccaacatcaaccccaacaatggcggcaccacctacaaccagaagttcgaggacagattcaccatcagccgggacaacagcaagaacaccctgtacctccagatgaactccctgagagccgaggacaccgccgtgtactattgtgccagaggctggaacttcgactactggggccagggaacactggtcaccgttagctctacgcgtaccacgacgccagcgccgcgaccaccaacaccggcgcccaccatcgcgtcgcagcccctgtccctgcgcccagaggcgtgccggccagcggcggggggcgcagtgcacacgagggggctggacttcgcctgtgacatctacatctgggcgcccttggccgggacttgtggggtccttctcctgtcactggttatcaccctttactgcaaacggggcagaaagaaactcctgtatatattcaaacaaccatttatgagaccagtacaaactactcaagaggaagatggctgtagctgccgatttccagaagaagaagaaggaggatgtgaactgagagtgaagttcagcaggagcgcagacgcccccgcgtaccagcagggccagaaccagctctataacgagctgaatctaggacgaagagaggagtacgatgttttggacaagagacgtggccgggaccctgagatggggggaaagccgagaaggaagaaccctcaggaaggcctgtacaatgaactgcagaaagataagatggcggaggcctacagtgagattgggatgaaaggcgagcgccggaggggcaaggggcacgatggcctttaccagggtctcagtacagccaccaaggacacctacgacgcccttcacatgcaggccctgccccctcgctaa

SEQ ID NO: 8651 - DNA, 1488 bp, synthetic construct
  source 1..1488: mol_type = other DNA
atggccttaccagtgaccgccttgctcctgccgctggccttgctgctccacgccgccaggccggccaagagcgaggacctgtacggaggcagcggagacatccagatgacacagagccctagcagcctgtctgccagcgtgggagacagagtgaccatcacatgcaaggccagccaggatgtgggcacagccgtggattggtatcagcagaagcctggcaaggcccctaagctgctgatctactgggccagcacaagacacacaggcgtgcccagcagattttctggcagcggctctggcaccgacttcaccctgacaatatccagcctccagcctgaggacttcgccacctactactgccagcagtacaacagctaccctctgaccttcggccagggcaccaaggtggaaatcaaaagaggcggaggcggatctggcggcggaggtagcggtggcggaggatctgaagtgcagctggttgaatcaggtggcggcctggttcaacctggcggatctctgagactgagctgtgccgccagcggctacacctttaccgagtacacaatccactgggtccgacaggcccctggcaaaggacttgagtgggtcgccaacatcaaccccaacaatggcggcaccacctacaaccagaagttcgaggacagattcaccatcagccgggacaacagcaagaacaccctgtacctccagatgaactccctgagagccgaggacaccgccgtgtactattgtgccagaggctggaacttcgactactggggccagggaacactggtcaccgttagctctacgcgtaccacgacgccagcgccgcgaccaccaacaccggcgcccaccatcgcgtcgcagcccctgtccctgcgcccagaggcgtgccggccagcggcggggggcgcagtgcacacgagggggctggacttcgcctgtgacatctacatctgggcgcccttggccgggacttgtggggtccttctcctgtcactggttatcaccctttactgcaaacggggcagaaagaaactcctgtatatattcaaacaaccatttatgagaccagtacaaactactcaagaggaagatggctgtagctgccgatttccagaagaagaagaaggaggatgtgaactgagagtgaagttcagcaggagcgcagacgcccccgcgtaccagcagggccagaaccagctctataacgagctgaatctaggacgaagagaggagtacgatgttttggacaagagacgtggccgggaccctgagatggggggaaagccgagaaggaagaaccctcaggaaggcctgtacaatgaactgcagaaagataagatggcggaggcctacagtgagattgggatgaaaggcgagcgccggaggggcaaggggcacgatggcctttaccagggtctcagtacagccaccaaggacacctacgacgcccttcacatgcaggccctgccccctcgctaa

SEQ ID NO: 8652 - DNA, 1515 bp, synthetic construct
  source 1..1515: mol_type = other DNA
atggccttaccagtgaccgccttgctcctgccgctggccttgctgctccacgccgccaggccggcccgccccgccaagagcgaggacctgtaccccaaccccaagggcagcggaggcagcggagacatccagatgacacagagccctagcagcctgtctgccagcgtgggagacagagtgaccatcacatgcaaggccagccaggatgtgggcacagccgtggattggtatcagcagaagcctggcaaggcccctaagctgctgatctactgggccagcacaagacacacaggcgtgcccagcagattttctggcagcggctctggcaccgacttcaccctgacaatatccagcctccagcctgaggacttcgccacctactactgccagcagtacaacagctaccctctgaccttcggccagggcaccaaggtggaaatcaaaagaggcggaggcggatctggcggcggaggtagcggtggcggaggatctgaagtgcagctggttgaatcaggtggcggcctggttcaacctggcggatctctgagactgagctgtgccgccagcggctacacctttaccgagtacacaatccactgggtccgacaggcccctggcaaaggacttgagtgggtcgccaacatcaaccccaacaatggcggcaccacctacaaccagaagttcgaggacagattcaccatcagccgggacaacagcaagaacaccctgtacctccagatgaactccctgagagccgaggacaccgccgtgtactattgtgccagaggctggaacttcgactactggggccagggaacactggtcaccgttagctctacgcgtaccacgacgccagcgccgcgaccaccaacaccggcgcccaccatcgcgtcgcagcccctgtccctgcgcccagaggcgtgccggccagcggcggggggcgcagtgcacacgagggggctggacttcgcctgtgacatctacatctgggcgcccttggccgggacttgtggggtccttctcctgtcactggttatcaccctttactgcaaacggggcagaaagaaactcctgtatatattcaaacaaccatttatgagaccagtacaaactactcaagaggaagatggctgtagctgccgatttccagaagaagaagaaggaggatgtgaactgagagtgaagttcagcaggagcgcagacgcccccgcgtaccagcagggccagaaccagctctataacgagctgaatctaggacgaagagaggagtacgatgttttggacaagagacgtggccgggaccctgagatggggggaaagccgagaaggaagaaccctcaggaaggcctgtacaatgaactgcagaaagataagatggcggaggcctacagtgagattgggatgaaaggcgagcgccggaggggcaaggggcacgatggcctttaccagggtctcagtacagccaccaaggacacctacgacgcccttcacatgcaggccctgccccctcgctaa

SEQ ID NO: 8653 - DNA, 1512 bp, synthetic construct
  source 1..1512: mol_type = other DNA
atggccttaccagtgaccgccttgctcctgccgctggccttgctgctccacgccgccaggccggcccgccccgccaagagcgaggacctgtaccccaaccccaagggcggaggcagcggagacatccagatgacacagagccctagcagcctgtctgccagcgtgggagacagagtgaccatcacatgcaaggccagccaggatgtgggcacagccgtggattggtatcagcagaagcctggcaaggcccctaagctgctgatctactgggccagcacaagacacacaggcgtgcccagcagattttctggcagcggctctggcaccgacttcaccctgacaatatccagcctccagcctgaggacttcgccacctactactgccagcagtacaacagctaccctctgaccttcggccagggcaccaaggtggaaatcaaaagaggcggaggcggatctggcggcggaggtagcggtggcggaggatctgaagtgcagctggttgaatcaggtggcggcctggttcaacctggcggatctctgagactgagctgtgccgccagcggctacacctttaccgagtacacaatccactgggtccgacaggcccctggcaaaggacttgagtgggtcgccaacatcaaccccaacaatggcggcaccacctacaaccagaagttcgaggacagattcaccatcagccgggacaacagcaagaacaccctgtacctccagatgaactccctgagagccgaggacaccgccgtgtactattgtgccagaggctggaacttcgactactggggccagggaacactggtcaccgttagctctacgcgtaccacgacgccagcgccgcgaccaccaacaccggcgcccaccatcgcgtcgcagcccctgtccctgcgcccagaggcgtgccggccagcggcggggggcgcagtgcacacgagggggctggacttcgcctgtgacatctacatctgggcgcccttggccgggacttgtggggtccttctcctgtcactggttatcaccctttactgcaaacggggcagaaagaaactcctgtatatattcaaacaaccatttatgagaccagtacaaactactcaagaggaagatggctgtagctgccgatttccagaagaagaagaaggaggatgtgaactgagagtgaagttcagcaggagcgcagacgcccccgcgtaccagcagggccagaaccagctctataacgagctgaatctaggacgaagagaggagtacgatgttttggacaagagacgtggccgggaccctgagatggggggaaagccgagaaggaagaaccctcaggaaggcctgtacaatgaactgcagaaagataagatggcggaggcctacagtgagattgggatgaaaggcgagcgccggaggggcaaggggcacgatggcctttaccagggtctcagtacagccaccaaggacacctacgacgcccttcacatgcaggccctgccccctcgctaa

SEQ ID NO: 8654 - DNA, 1509 bp, synthetic construct
  source 1..1509: mol_type = other DNA
atggccttaccagtgaccgccttgctcctgccgctggccttgctgctccacgccgccaggccggcccgccccgccaagagcgaggacctgtaccccaaccccaagggaggcagcggagacatccagatgacacagagccctagcagcctgtctgccagcgtgggagacagagtgaccatcacatgcaaggccagccaggatgtgggcacagccgtggattggtatcagcagaagcctggcaaggcccctaagctgctgatctactgggccagcacaagacacacaggcgtgcccagcagattttctggcagcggctctggcaccgacttcaccctgacaatatccagcctccagcctgaggacttcgccacctactactgccagcagtacaacagctaccctctgaccttcggccagggcaccaaggtggaaatcaaaagaggcggaggcggatctggcggcggaggtagcggtggcggaggatctgaagtgcagctggttgaatcaggtggcggcctggttcaacctggcggatctctgagactgagctgtgccgccagcggctacacctttaccgagtacacaatccactgggtccgacaggcccctggcaaaggacttgagtgggtcgccaacatcaaccccaacaatggcggcaccacctacaaccagaagttcgaggacagattcaccatcagccgggacaacagcaagaacaccctgtacctccagatgaactccctgagagccgaggacaccgccgtgtactattgtgccagaggctggaacttcgactactggggccagggaacactggtcaccgttagctctacgcgtaccacgacgccagcgccgcgaccaccaacaccggcgcccaccatcgcgtcgcagcccctgtccctgcgcccagaggcgtgccggccagcggcggggggcgcagtgcacacgagggggctggacttcgcctgtgacatctacatctgggcgcccttggccgggacttgtggggtccttctcctgtcactggttatcaccctttactgcaaacggggcagaaagaaactcctgtatatattcaaacaaccatttatgagaccagtacaaactactcaagaggaagatggctgtagctgccgatttccagaagaagaagaaggaggatgtgaactgagagtgaagttcagcaggagcgcagacgcccccgcgtaccagcagggccagaaccagctctataacgagctgaatctaggacgaagagaggagtacgatgttttggacaagagacgtggccgggaccctgagatggggggaaagccgagaaggaagaaccctcaggaaggcctgtacaatgaactgcagaaagataagatggcggaggcctacagtgagattgggatgaaaggcgagcgccggaggggcaaggggcacgatggcctttaccagggtctcagtacagccaccaaggacacctacgacgcccttcacatgcaggccctgccccctcgctaa

SEQ ID NO: 8655 - DNA, 1506 bp, synthetic construct
  source 1..1506: mol_type = other DNA
atggccttaccagtgaccgccttgctcctgccgctggccttgctgctccacgccgccaggccggcccgccccgccaagagcgaggacctgtaccccaaccccggaggcagcggagacatccagatgacacagagccctagcagcctgtctgccagcgtgggagacagagtgaccatcacatgcaaggccagccaggatgtgggcacagccgtggattggtatcagcagaagcctggcaaggcccctaagctgctgatctactgggccagcacaagacacacaggcgtgcccagcagattttctggcagcggctctggcaccgacttcaccctgacaatatccagcctccagcctgaggacttcgccacctactactgccagcagtacaacagctaccctctgaccttcggccagggcaccaaggtggaaatcaaaagaggcggaggcggatctggcggcggaggtagcggtggcggaggatctgaagtgcagctggttgaatcaggtggcggcctggttcaacctggcggatctctgagactgagctgtgccgccagcggctacacctttaccgagtacacaatccactgggtccgacaggcccctggcaaaggacttgagtgggtcgccaacatcaaccccaacaatggcggcaccacctacaaccagaagttcgaggacagattcaccatcagccgggacaacagcaagaacaccctgtacctccagatgaactccctgagagccgaggacaccgccgtgtactattgtgccagaggctggaacttcgactactggggccagggaacactggtcaccgttagctctacgcgtaccacgacgccagcgccgcgaccaccaacaccggcgcccaccatcgcgtcgcagcccctgtccctgcgcccagaggcgtgccggccagcggcggggggcgcagtgcacacgagggggctggacttcgcctgtgacatctacatctgggcgcccttggccgggacttgtggggtccttctcctgtcactggttatcaccctttactgcaaacggggcagaaagaaactcctgtatatattcaaacaaccatttatgagaccagtacaaactactcaagaggaagatggctgtagctgccgatttccagaagaagaagaaggaggatgtgaactgagagtgaagttcagcaggagcgcagacgcccccgcgtaccagcagggccagaaccagctctataacgagctgaatctaggacgaagagaggagtacgatgttttggacaagagacgtggccgggaccctgagatggggggaaagccgagaaggaagaaccctcaggaaggcctgtacaatgaactgcagaaagataagatggcggaggcctacagtgagattgggatgaaaggcgagcgccggaggggcaaggggcacgatggcctttaccagggtctcagtacagccaccaaggacacctacgacgcccttcacatgcaggccctgccccctcgctaa

SEQ ID NO: 8656 - DNA, 1503 bp, synthetic construct
  source 1..1503: mol_type = other DNA
atggccttaccagtgaccgccttgctcctgccgctggccttgctgctccacgccgccaggccggcccgccccgccaagagcgaggacctgtaccccaacggaggcagcggagacatccagatgacacagagccctagcagcctgtctgccagcgtgggagacagagtgaccatcacatgcaaggccagccaggatgtgggcacagccgtggattggtatcagcagaagcctggcaaggcccctaagctgctgatctactgggccagcacaagacacacaggcgtgcccagcagattttctggcagcggctctggcaccgacttcaccctgacaatatccagcctccagcctgaggacttcgccacctactactgccagcagtacaacagctaccctctgaccttcggccagggcaccaaggtggaaatcaaaagaggcggaggcggatctggcggcggaggtagcggtggcggaggatctgaagtgcagctggttgaatcaggtggcggcctggttcaacctggcggatctctgagactgagctgtgccgccagcggctacacctttaccgagtacacaatccactgggtccgacaggcccctggcaaaggacttgagtgggtcgccaacatcaaccccaacaatggcggcaccacctacaaccagaagttcgaggacagattcaccatcagccgggacaacagcaagaacaccctgtacctccagatgaactccctgagagccgaggacaccgccgtgtactattgtgccagaggctggaacttcgactactggggccagggaacactggtcaccgttagctctacgcgtaccacgacgccagcgccgcgaccaccaacaccggcgcccaccatcgcgtcgcagcccctgtccctgcgcccagaggcgtgccggccagcggcggggggcgcagtgcacacgagggggctggacttcgcctgtgacatctacatctgggcgcccttggccgggacttgtggggtccttctcctgtcactggttatcaccctttactgcaaacggggcagaaagaaactcctgtatatattcaaacaaccatttatgagaccagtacaaactactcaagaggaagatggctgtagctgccgatttccagaagaagaagaaggaggatgtgaactgagagtgaagttcagcaggagcgcagacgcccccgcgtaccagcagggccagaaccagctctataacgagctgaatctaggacgaagagaggagtacgatgttttggacaagagacgtggccgggaccctgagatggggggaaagccgagaaggaagaaccctcaggaaggcctgtacaatgaactgcagaaagataagatggcggaggcctacagtgagattgggatgaaaggcgagcgccggaggggcaaggggcacgatggcctttaccagggtctcagtacagccaccaaggacacctacgacgcccttcacatgcaggccctgccccctcgctaa

SEQ ID NO: 8657 - DNA, 1500 bp, synthetic construct
  source 1..1500: mol_type = other DNA
atggccttaccagtgaccgccttgctcctgccgctggccttgctgctccacgccgccaggccggcccgccccgccaagagcgaggacctgtaccccggaggcagcggagacatccagatgacacagagccctagcagcctgtctgccagcgtgggagacagagtgaccatcacatgcaaggccagccaggatgtgggcacagccgtggattggtatcagcagaagcctggcaaggcccctaagctgctgatctactgggccagcacaagacacacaggcgtgcccagcagattttctggcagcggctctggcaccgacttcaccctgacaatatccagcctccagcctgaggacttcgccacctactactgccagcagtacaacagctaccctctgaccttcggccagggcaccaaggtggaaatcaaaagaggcggaggcggatctggcggcggaggtagcggtggcggaggatctgaagtgcagctggttgaatcaggtggcggcctggttcaacctggcggatctctgagactgagctgtgccgccagcggctacacctttaccgagtacacaatccactgggtccgacaggcccctggcaaaggacttgagtgggtcgccaacatcaaccccaacaatggcggcaccacctacaaccagaagttcgaggacagattcaccatcagccgggacaacagcaagaacaccctgtacctccagatgaactccctgagagccgaggacaccgccgtgtactattgtgccagaggctggaacttcgactactggggccagggaacactggtcaccgttagctctacgcgtaccacgacgccagcgccgcgaccaccaacaccggcgcccaccatcgcgtcgcagcccctgtccctgcgcccagaggcgtgccggccagcggcggggggcgcagtgcacacgagggggctggacttcgcctgtgacatctacatctgggcgcccttggccgggacttgtggggtccttctcctgtcactggttatcaccctttactgcaaacggggcagaaagaaactcctgtatatattcaaacaaccatttatgagaccagtacaaactactcaagaggaagatggctgtagctgccgatttccagaagaagaagaaggaggatgtgaactgagagtgaagttcagcaggagcgcagacgcccccgcgtaccagcagggccagaaccagctctataacgagctgaatctaggacgaagagaggagtacgatgttttggacaagagacgtggccgggaccctgagatggggggaaagccgagaaggaagaaccctcaggaaggcctgtacaatgaactgcagaaagataagatggcggaggcctacagtgagattgggatgaaaggcgagcgccggaggggcaaggggcacgatggcctttaccagggtctcagtacagccaccaaggacacctacgacgcccttcacatgcaggccctgccccctcgctaa

SEQ ID NO: 8658 - DNA, 1497 bp, synthetic construct
  source 1..1497: mol_type = other DNA
atggccttaccagtgaccgccttgctcctgccgctggccttgctgctccacgccgccaggccggcccgccccgccaagagcgaggacctgtacggaggcagcggagacatccagatgacacagagccctagcagcctgtctgccagcgtgggagacagagtgaccatcacatgcaaggccagccaggatgtgggcacagccgtggattggtatcagcagaagcctggcaaggcccctaagctgctgatctactgggccagcacaagacacacaggcgtgcccagcagattttctggcagcggctctggcaccgacttcaccctgacaatatccagcctccagcctgaggacttcgccacctactactgccagcagtacaacagctaccctctgaccttcggccagggcaccaaggtggaaatcaaaagaggcggaggcggatctggcggcggaggtagcggtggcggaggatctgaagtgcagctggttgaatcaggtggcggcctggttcaacctggcggatctctgagactgagctgtgccgccagcggctacacctttaccgagtacacaatccactgggtccgacaggcccctggcaaaggacttgagtgggtcgccaacatcaaccccaacaatggcggcaccacctacaaccagaagttcgaggacagattcaccatcagccgggacaacagcaagaacaccctgtacctccagatgaactccctgagagccgaggacaccgccgtgtactattgtgccagaggctggaacttcgactactggggccagggaacactggtcaccgttagctctacgcgtaccacgacgccagcgccgcgaccaccaacaccggcgcccaccatcgcgtcgcagcccctgtccctgcgcccagaggcgtgccggccagcggcggggggcgcagtgcacacgagggggctggacttcgcctgtgacatctacatctgggcgcccttggccgggacttgtggggtccttctcctgtcactggttatcaccctttactgcaaacggggcagaaagaaactcctgtatatattcaaacaaccatttatgagaccagtacaaactactcaagaggaagatggctgtagctgccgatttccagaagaagaagaaggaggatgtgaactgagagtgaagttcagcaggagcgcagacgcccccgcgtaccagcagggccagaaccagctctataacgagctgaatctaggacgaagagaggagtacgatgttttggacaagagacgtggccgggaccctgagatggggggaaagccgagaaggaagaaccctcaggaaggcctgtacaatgaactgcagaaagataagatggcggaggcctacagtgagattgggatgaaaggcgagcgccggaggggcaaggggcacgatggcctttaccagggtctcagtacagccaccaaggacacctacgacgcccttcacatgcaggccctgccccctcgctaa

SEQ ID NO: 8659 - DNA, 1494 bp, synthetic construct
  source 1..1494: mol_type = other DNA
atggccttaccagtgaccgccttgctcctgccgctggccttgctgctccacgccgccaggccgcgccccgccaagagcgaggacctgtacggaggcagcggagacatccagatgacacagagccctagcagcctgtctgccagcgtgggagacagagtgaccatcacatgcaaggccagccaggatgtgggcacagccgtggattggtatcagcagaagcctggcaaggcccctaagctgctgatctactgggccagcacaagacacacaggcgtgcccagcagattttctggcagcggctctggcaccgacttcaccctgacaatatccagcctccagcctgaggacttcgccacctactactgccagcagtacaacagctaccctctgaccttcggccagggcaccaaggtggaaatcaaaagaggcggaggcggatctggcggcggaggtagcggtggcggaggatctgaagtgcagctggttgaatcaggtggcggcctggttcaacctggcggatctctgagactgagctgtgccgccagcggctacacctttaccgagtacacaatccactgggtccgacaggcccctggcaaaggacttgagtgggtcgccaacatcaaccccaacaatggcggcaccacctacaaccagaagttcgaggacagattcaccatcagccgggacaacagcaagaacaccctgtacctccagatgaactccctgagagccgaggacaccgccgtgtactattgtgccagaggctggaacttcgactactggggccagggaacactggtcaccgttagctctacgcgtaccacgacgccagcgccgcgaccaccaacaccggcgcccaccatcgcgtcgcagcccctgtccctgcgcccagaggcgtgccggccagcggcggggggcgcagtgcacacgagggggctggacttcgcctgtgacatctacatctgggcgcccttggccgggacttgtggggtccttctcctgtcactggttatcaccctttactgcaaacggggcagaaagaaactcctgtatatattcaaacaaccatttatgagaccagtacaaactactcaagaggaagatggctgtagctgccgatttccagaagaagaagaaggaggatgtgaactgagagtgaagttcagcaggagcgcagacgcccccgcgtaccagcagggccagaaccagctctataacgagctgaatctaggacgaagagaggagtacgatgttttggacaagagacgtggccgggaccctgagatggggggaaagccgagaaggaagaaccctcaggaaggcctgtacaatgaactgcagaaagataagatggcggaggcctacagtgagattgggatgaaaggcgagcgccggaggggcaaggggcacgatggcctttaccagggtctcagtacagccaccaaggacacctacgacgcccttcacatgcaggccctgccccctcgctaa

SEQ ID NO: 8660 - DNA, 1491 bp, synthetic construct
  source 1..1491: mol_type = other DNA
atggccttaccagtgaccgccttgctcctgccgctggccttgctgctccacgccgccaggccgcccgccaagagcgaggacctgtacggaggcagcggagacatccagatgacacagagccctagcagcctgtctgccagcgtgggagacagagtgaccatcacatgcaaggccagccaggatgtgggcacagccgtggattggtatcagcagaagcctggcaaggcccctaagctgctgatctactgggccagcacaagacacacaggcgtgcccagcagattttctggcagcggctctggcaccgacttcaccctgacaatatccagcctccagcctgaggacttcgccacctactactgccagcagtacaacagctaccctctgaccttcggccagggcaccaaggtggaaatcaaaagaggcggaggcggatctggcggcggaggtagcggtggcggaggatctgaagtgcagctggttgaatcaggtggcggcctggttcaacctggcggatctctgagactgagctgtgccgccagcggctacacctttaccgagtacacaatccactgggtccgacaggcccctggcaaaggacttgagtgggtcgccaacatcaaccccaacaatggcggcaccacctacaaccagaagttcgaggacagattcaccatcagccgggacaacagcaagaacaccctgtacctccagatgaactccctgagagccgaggacaccgccgtgtactattgtgccagaggctggaacttcgactactggggccagggaacactggtcaccgttagctctacgcgtaccacgacgccagcgccgcgaccaccaacaccggcgcccaccatcgcgtcgcagcccctgtccctgcgcccagaggcgtgccggccagcggcggggggcgcagtgcacacgagggggctggacttcgcctgtgacatctacatctgggcgcccttggccgggacttgtggggtccttctcctgtcactggttatcaccctttactgcaaacggggcagaaagaaactcctgtatatattcaaacaaccatttatgagaccagtacaaactactcaagaggaagatggctgtagctgccgatttccagaagaagaagaaggaggatgtgaactgagagtgaagttcagcaggagcgcagacgcccccgcgtaccagcagggccagaaccagctctataacgagctgaatctaggacgaagagaggagtacgatgttttggacaagagacgtggccgggaccctgagatggggggaaagccgagaaggaagaaccctcaggaaggcctgtacaatgaactgcagaaagataagatggcggaggcctacagtgagattgggatgaaaggcgagcgccggaggggcaaggggcacgatggcctttaccagggtctcagtacagccaccaaggacacctacgacgcccttcacatgcaggccctgccccctcgctaa

SEQ ID NO: 8661 - DNA, 1488 bp, synthetic construct; identical to SEQ ID NO: 8651
  source 1..1488: mol_type = other DNA

SEQ ID NO: 8662 - DNA, 1500 bp, synthetic construct
  source 1..1500: mol_type = other DNA
atggccttaccagtgaccgccttgctcctgccgctggccttgctgctccacgccgccaggccggccaagagcgaggacctgtaccccaaccccaagggaggcagcggagacatccagatgacacagagccctagcagcctgtctgccagcgtgggagacagagtgaccatcacatgcaaggccagccaggatgtgggcacagccgtggattggtatcagcagaagcctggcaaggcccctaagctgctgatctactgggccagcacaagacacacaggcgtgcccagcagattttctggcagcggctctggcaccgacttcaccctgacaatatccagcctccagcctgaggacttcgccacctactactgccagcagtacaacagctaccctctgaccttcggccagggcaccaaggtggaaatcaaaagaggcggaggcggatctggcggcggaggtagcggtggcggaggatctgaagtgcagctggttgaatcaggtggcggcctggttcaacctggcggatctctgagactgagctgtgccgccagcggctacacctttaccgagtacacaatccactgggtccgacaggcccctggcaaaggacttgagtgggtcgccaacatcaaccccaacaatggcggcaccacctacaaccagaagttcgaggacagattcaccatcagccgggacaacagcaagaacaccctgtacctccagatgaactccctgagagccgaggacaccgccgtgtactattgtgccagaggctggaacttcgactactggggccagggaacactggtcaccgttagctctacgcgtaccacgacgccagcgccgcgaccaccaacaccggcgcccaccatcgcgtcgcagcccctgtccctgcgcccagaggcgtgccggccagcggcggggggcgcagtgcacacgagggggctggacttcgcctgtgacatctacatctgggcgcccttggccgggacttgtggggtccttctcctgtcactggttatcaccctttactgcaaacggggcagaaagaaactcctgtatatattcaaacaaccatttatgagaccagtacaaactactcaagaggaagatggctgtagctgccgatttccagaagaagaagaaggaggatgtgaactgagagtgaagttcagcaggagcgcagacgcccccgcgtaccagcagggccagaaccagctctataacgagctgaatctaggacgaagagaggagtacgatgttttggacaagagacgtggccgggaccctgagatggggggaaagccgagaaggaagaaccctcaggaaggcctgtacaatgaactgcagaaagataagatggcggaggcctacagtgagattgggatgaaaggcgagcgccggaggggcaaggggcacgatggcctttaccagggtctcagtacagccaccaaggacacctacgacgcccttcacatgcaggccctgccccctcgctaa

SEQ ID NO: 8663 - DNA, 1497 bp, synthetic construct
  source 1..1497: mol_type = other DNA
atggccttaccagtgaccgccttgctcctgccgctggccttgctgctccacgccgccaggccggccaagagcgaggacctgtaccccaaccccggaggcagcggagacatccagatgacacagagccctagcagcctgtctgccagcgtgggagacagagtgaccatcacatgcaaggccagccaggatgtgggcacagccgtggattggtatcagcagaagcctggcaaggcccctaagctgctgatctactgggccagcacaagacacacaggcgtgcccagcagattttctggcagcggctctggcaccgacttcaccctgacaatatccagcctccagcctgaggacttcgccacctactactgccagcagtacaacagctaccctctgaccttcggccagggcaccaaggtggaaatcaaaagaggcggaggcggatctggcggcggaggtagcggtggcggaggatctgaagtgcagctggttgaatcaggtggcggcctggttcaacctggcggatctctgagactgagctgtgccgccagcggctacacctttaccgagtacacaatccactgggtccgacaggcccctggcaaaggacttgagtgggtcgccaacatcaaccccaacaatggcggcaccacctacaaccagaagttcgaggacagattcaccatcagccgggacaacagcaagaacaccctgtacctccagatgaactccctgagagccgaggacaccgccgtgtactattgtgccagaggctggaacttcgactactggggccagggaacactggtcaccgttagctctacgcgtaccacgacgccagcgccgcgaccaccaacaccggcgcccaccatcgcgtcgcagcccctgtccctgcgcccagaggcgtgccggccagcggcggggggcgcagtgcacacgagggggctggacttcgcctgtgacatctacatctgggcgcccttggccgggacttgtggggtccttctcctgtcactggttatcaccctttactgcaaacggggcagaaagaaactcctgtatatattcaaacaaccatttatgagaccagtacaaactactcaagaggaagatggctgtagctgccgatttccagaagaagaagaaggaggatgtgaactgagagtgaagttcagcaggagcgcagacgcccccgcgtaccagcagggccagaaccagctctataacgagctgaatctaggacgaagagaggagtacgatgttttggacaagagacgtggccgggaccctgagatggggggaaagccgagaaggaagaaccctcaggaaggcctgtacaatgaactgcagaaagataagatggcggaggcctacagtgagattgggatgaaaggcgagcgccggaggggcaaggggcacgatggcctttaccagggtctcagtacagccaccaaggacacctacgacgcccttcacatgcaggccctgccccctcgctaa

SEQ ID NO: 8664 - DNA, 1494 bp, synthetic construct
  source 1..1494: mol_type = other DNA
atggccttaccagtgaccgccttgctcctgccgctggccttgctgctccacgccgccaggccggccaagagcgaggacctgtaccccaacggaggcagcggagacatccagatgacacagagccctagcagcctgtctgccagcgtgggagacagagtgaccatcacatgcaaggccagccaggatgtgggcacagccgtggattggtatcagcagaagcctggcaaggcccctaagctgctgatctactgggccagcacaagacacacaggcgtgcccagcagattttctggcagcggctctggcaccgacttcaccctgacaatatccagcctccagcctgaggacttcgccacctactactgccagcagtacaacagctaccctctgaccttcggccagggcaccaaggtggaaatcaaaagaggcggaggcggatctggcggcggaggtagcggtggcggaggatctgaagtgcagctggttgaatcaggtggcggcctggttcaacctggcggatctctgagactgagctgtgccgccagcggctacacctttaccgagtacacaatccactgggtccgacaggcccctggcaaaggacttgagtgggtcgccaacatcaaccccaacaatggcggcaccacctacaaccagaagttcgaggacagattcaccatcagccgggacaacagcaagaacaccctgtacctccagatgaactccctgagagccgaggacaccgccgtgtactattgtgccagaggctggaacttcgactactggggccagggaacactggtcaccgttagctctacgcgtaccacgacgccagcgccgcgaccaccaacaccggcgcccaccatcgcgtcgcagcccctgtccctgcgcccagaggcgtgccggccagcggcggggggcgcagtgcacacgagggggctggacttcgcctgtgacatctacatctgggcgcccttggccgggacttgtggggtccttctcctgtcactggttatcaccctttactgcaaacggggcagaaagaaactcctgtatatattcaaacaaccatttatgagaccagtacaaactactcaagaggaagatggctgtagctgccgatttccagaagaagaagaaggaggatgtgaactgagagtgaagttcagcaggagcgcagacgcccccgcgtaccagcagggccagaaccagctctataacgagctgaatctaggacgaagagaggagtacgatgttttggacaagagacgtggccgggaccctgagatggggggaaagccgagaaggaagaaccctcaggaaggcctgtacaatgaactgcagaaagataagatggcggaggcctacagtgagattgggatgaaaggcgagcgccggaggggcaaggggcacgatggcctttaccagggtctcagtacagccaccaaggacacctacgacgcccttcacatgcaggccctgccccctcgctaa

SEQ ID NO: 8665 - DNA, 1491 bp, synthetic construct
  source 1..1491: mol_type = other DNA
atggccttaccagtgaccgccttgctcctgccgctggccttgctgctccacgccgccaggccggccaagagcgaggacctgtaccccggaggcagcggagacatccagatgacacagagccctagcagcctgtctgccagcgtgggagacagagtgaccatcacatgcaaggccagccaggatgtgggcacagccgtggattggtatcagcagaagcctggcaaggcccctaagctgctgatctactgggccagcacaagacacacaggcgtgcccagcagattttctggcagcggctctggcaccgacttcaccctgacaatatccagcctccagcctgaggacttcgccacctactactgccagcagtacaacagctaccctctgaccttcggccagggcaccaaggtggaaatcaaaagaggcggaggcggatctggcggcggaggtagcggtggcggaggatctgaagtgcagctggttgaatcaggtggcggcctggttcaacctggcggatctctgagactgagctgtgccgccagcggctacacctttaccgagtacacaatccactgggtccgacaggcccctggcaaaggacttgagtgggtcgccaacatcaaccccaacaatggcggcaccacctacaaccagaagttcgaggacagattcaccatcagccgggacaacagcaagaacaccctgtacctccagatgaactccctgagagccgaggacaccgccgtgtactattgtgccagaggctggaacttcgactactggggccagggaacactggtcaccgttagctctacgcgtaccacgacgccagcgccgcgaccaccaacaccggcgcccaccatcgcgtcgcagcccctgtccctgcgcccagaggcgtgccggccagcggcggggggcgcagtgcacacgagggggctggacttcgcctgtgacatctacatctgggcgcccttggccgggacttgtggggtccttctcctgtcactggttatcaccctttactgcaaacggggcagaaagaaactcctgtatatattcaaacaaccatttatgagaccagtacaaactactcaagaggaagatggctgtagctgccgatttccagaagaagaagaaggaggatgtgaactgagagtgaagttcagcaggagcgcagacgcccccgcgtaccagcagggccagaaccagctctataacgagctgaatctaggacgaagagaggagtacgatgttttggacaagagacgtggccgggaccctgagatggggggaaagccgagaaggaagaaccctcaggaaggcctgtacaatgaactgcagaaagataagatggcggaggcctacagtgagattgggatgaaaggcgagcgccggaggggcaaggggcacgatggcctttaccagggtctcagtacagccaccaaggacacctacgacgcccttcacatgcaggccctgccccctcgctaa

SEQ ID NO: 8666 - DNA, 1488 bp, synthetic construct; identical to SEQ ID NO: 8651
  source 1..1488: mol_type = other DNA

SEQ ID NO: 8667 - DNA, 1497 bp, synthetic construct
  source 1..1497: mol_type = other DNA
atggccttaccagtgaccgccttgctcctgccgctggccttgctgctccacgccgccaggccgaagagcgaggacctgtaccccaaccccaagggaggcagcggagacatccagatgacacagagccctagcagcctgtctgccagcgtgggagacagagtgaccatcacatgcaaggccagccaggatgtgggcacagccgtggattggtatcagcagaagcctggcaaggcccctaagctgctgatctactgggccagcacaagacacacaggcgtgcccagcagattttctggcagcggctctggcaccgacttcaccctgacaatatccagcctccagcctgaggacttcgccacctactactgccagcagtacaacagctaccctctgaccttcggccagggcaccaaggtggaaatcaaaagaggcggaggcggatctggcggcggaggtagcggtggcggaggatctgaagtgcagctggttgaatcaggtggcggcctggttcaacctggcggatctctgagactgagctgtgccgccagcggctacacctttaccgagtacacaatccactgggtccgacaggcccctggcaaaggacttgagtgggtcgccaacatcaaccccaacaatggcggcaccacctacaaccagaagttcgaggacagattcaccatcagccgggacaacagcaagaacaccctgtacctccagatgaactccctgagagccgaggacaccgccgtgtactattgtgccagaggctggaacttcgactactggggccagggaacactggtcaccgttagctctacgcgtaccacgacgccagcgccgcgaccaccaacaccggcgcccaccatcgcgtcgcagcccctgtccctgcgcccagaggcgtgccggccagcggcggggggcgcagtgcacacgagggggctggacttcgcctgtgacatctacatctgggcgcccttggccgggacttgtggggtccttctcctgtcactggttatcaccctttactgcaaacggggcagaaagaaactcctgtatatattcaaacaaccatttatgagaccagtacaaactactcaagaggaagatggctgtagctgccgatttccagaagaagaagaaggaggatgtgaactgagagtgaagttcagcaggagcgcagacgcccccgcgtaccagcagggccagaaccagctctataacgagctgaatctaggacgaagagaggagtacgatgttttggacaagagacgtggccgggaccctgagatggggggaaagccgagaaggaagaaccctcaggaaggcctgtacaatgaactgcagaaagataagatggcggaggcctacagtgagattgggatgaaaggcgagcgccggaggggcaaggggcacgatggcctttaccagggtctcagtacagccaccaaggacacctacgacgcccttcacatgcaggccctgccccctcgctaa

SEQ ID NO: 8668 - DNA, 1494 bp, synthetic construct
  source 1..1494: mol_type = other DNA
atggccttaccagtgaccgccttgctcctgccgctggccttgctgctccacgccgccaggccgaagagcgaggacctgtaccccaaccccggaggcagcggagacatccagatgacacagagccctagcagcctgtctgccagcgtgggagacagagtgaccatcacatgcaaggccagccaggatgtgggcacagccgtggattggtatcagcagaagcctggcaaggcccctaagctgctgatctactgggccagcacaagacacacaggcgtgcccagcagattttctggcagcggctctggcaccgacttcaccctgacaatatccagcctccagcctgaggacttcgccacctactactgccagcagtacaacagctaccctctgaccttcggccagggcaccaaggtggaaatcaaaagaggcggaggcggatctggcggcggaggtagcggtggcggaggatctgaagtgcagctggttgaatcaggtggcggcctggttcaacctggcggatctctgagactgagctgtgccgccagcggctacacctttaccgagtacacaatccactgggtccgacaggcccctggcaaaggacttgagtgggtcgccaacatcaaccccaacaatggcggcaccacctacaaccagaagttcgaggacagattcaccatcagccgggacaacagcaagaacaccctgtacctccagatgaactccctgagagccgaggacaccgccgtgtactattgtgccagaggctggaacttcgactactggggccagggaacactggtcaccgttagctctacgcgtaccacgacgccagcgccgcgaccaccaacaccggcgcccaccatcgcgtcgcagcccctgtccctgcgcccagaggcgtgccggccagcggcggggggcgcagtgcacacgagggggctggacttcgcctgtgacatctacatctgggcgcccttggccgggacttgtggggtccttctcctgtcactggttatcaccctttactgcaaacggggcagaaagaaactcctgtatatattcaaacaaccatttatgagaccagtacaaactactcaagaggaagatggctgtagctgccgatttccagaagaagaagaaggaggatgtgaactgagagtgaagttcagcaggagcgcagacgcccccgcgtaccagcagggccagaaccagctctataacgagctgaatctaggacgaagagaggagtacgatgttttggacaagagacgtggccgggaccctgagatggggggaaagccgagaaggaagaaccctcaggaaggcctgtacaatgaactgcagaaagataagatggcggaggcctacagtgagattgggatgaaaggcgagcgccggaggggcaaggggcacgatggcctttaccagggtctcagtacagccaccaaggacacctacgacgcccttcacatgcaggccctgccccctcgctaa

SEQ ID NO: 8669 - DNA, 1491 bp, synthetic construct
  source 1..1491: mol_type = other DNA
atggccttaccagtgaccgccttgctcctgccgctggccttgctgctccacgccgccaggccgaagagcgaggacctgtaccccaacggaggcagcggagacatccagatgacacagagccctagcagcctgtctgccagcgtgggagacagagtgaccatcacatgcaaggccagccaggatgtgggcacagccgtggattggtatcagcagaagcctggcaaggcccctaagctgctgatctactgggccagcacaagacacacaggcgtgcccagcagattttctggcagcggctctggcaccgacttcaccctgacaatatccagcctccagcctgaggacttcgccacctactactgccagcagtacaacagctaccctctgaccttcggccagggcaccaaggtggaaatcaaaagaggcggaggcggatctggcggcggaggtagcggtggcggaggatctgaagtgcagctggttgaatcaggtggcggcctggttcaacctggcggatctctgagactgagctgtgccgccagcggctacacctttaccgagtacacaatccactgggtccgacaggcccctggcaaaggacttgagtgggtcgccaacatcaaccccaacaatggcggcaccacctacaaccagaagttcgaggacagattcaccatcagccgggacaacagcaagaacaccctgtacctccagatgaactccctgagagccgaggacaccgccgtgtactattgtgccagaggctggaacttcgactactggggccagggaacactggtcaccgttagctctacgcgtaccacgacgccagcgccgcgaccaccaacaccggcgcccaccatcgcgtcgcagcccctgtccctgcgcccagaggcgtgccggccagcggcggggggcgcagtgcacacgagggggctggacttcgcctgtgacatctacatctgggcgcccttggccgggacttgtggggtccttctcctgtcactggttatcaccctttactgcaaacggggcagaaagaaactcctgtatatattcaaacaaccatttatgagaccagtacaaactactcaagaggaagatggctgtagctgccgatttccagaagaagaagaaggaggatgtgaactgagagtgaagttcagcaggagcgcagacgcccccgcgtaccagcagggccagaaccagctctataacgagctgaatctaggacgaagagaggagtacgatgttttggacaagagacgtggccgggaccctgagatggggggaaagccgagaaggaagaaccctcaggaaggcctgtacaatgaactgcagaaagataagatggcggaggcctacagtgagattgggatgaaaggcgagcgccggaggggcaaggggcacgatggcctttaccagggtctcagtacagccaccaaggacacctacgacgcccttcacatgcaggccctgccccctcgctaa

SEQ ID NO: 8670 - DNA, 1488 bp, synthetic construct
  source 1..1488: mol_type = other DNA
atggccttaccagtgaccgccttgctcctgccgctggccttgctgctccacgccgccaggccgaagagcgaggacctgtaccccggaggcagcggagacatccagatgacacagagccctagcagcctgtctgccagcgtgggagacagagtgaccatcacatgcaaggccagccaggatgtgggcacagccgtggattggtatcagcagaagcctggcaaggcccctaagctgctgatctactgggccagcacaagacacacaggcgtgcccagcagattttctggcagcggctctggcaccgacttcaccctgacaatatccagcctccagcctgaggacttcgccacctactactgccagcagtacaacagctaccctctgaccttcggccagggcaccaaggtggaaatcaaaagaggcggaggcggatctggcggcggaggtagcggtggcggaggatctgaagtgcagctggttgaatcaggtggcggcctggttcaacctggcggatctctgagactgagctgtgccgccagcggctacacctttaccgagtacacaatccactgggtccgacaggcccctggcaaaggacttgagtgggtcgccaacatcaaccccaacaatggcggcaccacctacaaccagaagttcgaggacagattcaccatcagccgggacaacagcaagaacaccctgtacctccagatgaactccctgagagccgaggacaccgccgtgtactattgtgccagaggctggaacttcgactactggggccagggaacactggtcaccgttagctctacgcgtaccacgacgccagcgccgcgaccaccaacaccggcgcccaccatcgcgtcgcagcccctgtccctgcgcccagaggcgtgccggccagcggcggggggcgcagtgcacacgagggggctggacttcgcctgtgacatctacatctgggcgcccttggccgggacttgtggggtccttctcctgtcactggttatcaccctttactgcaaacggggcagaaagaaactcctgtatatattcaaacaaccatttatgagaccagtacaaactactcaagaggaagatggctgtagctgccgatttccagaagaagaagaaggaggatgtgaactgagagtgaagttcagcaggagcgcagacgcccccgcgtaccagcagggccagaaccagctctataacgagctgaatctaggacgaagagaggagtacgatgttttggacaagagacgtggccgggaccctgagatggggggaaagccgagaaggaagaaccctcaggaaggcctgtacaatgaactgcagaaagataagatggcggaggcctacagtgagattgggatgaaaggcgagcgccggaggggcaaggggcacgatggcctttaccagggtctcagtacagccaccaaggacacctacgacgcccttcacatgcaggccctgccccctcgctaa

SEQ ID NO: 8671 - DNA, 1485 bp, synthetic construct
  source 1..1485: mol_type = other DNA
atggccttaccagtgaccgccttgctcctgccgctggccttgctgctccacgccgccaggccgaagagcgaggacctgtacggaggcagcggagacatccagatgacacagagccctagcagcctgtctgccagcgtgggagacagagtgaccatcacatgcaaggccagccaggatgtgggcacagccgtggattggtatcagcagaagcctggcaaggcccctaagctgctgatctactgggccagcacaagacacacaggcgtgcccagcagattttctggcagcggctctggcaccgacttcaccctgacaatatccagcctccagcctgaggacttcgccacctactactgccagcagtacaacagctaccctctgaccttcggccagggcaccaaggtggaaatcaaaagaggcggaggcggatctggcggcggaggtagcggtggcggaggatctgaagtgcagctggttgaatcaggtggcggcctggttcaacctggcggatctctgagactgagctgtgccgccagcggctacacctttaccgagtacacaatccactgggtccgacaggcccctggcaaaggacttgagtgggtcgccaacatcaaccccaacaatggcggcaccacctacaaccagaagttcgaggacagattcaccatcagccgggacaacagcaagaacaccctgtacctccagatgaactccctgagagccgaggacaccgccgtgtactattgtgccagaggctggaacttcgactactggggccagggaacactggtcaccgttagctctacgcgtaccacgacgccagcgccgcgaccaccaacaccggcgcccaccatcgcgtcgcagcccctgtccctgcgcccagaggcgtgccggccagcggcggggggcgcagtgcacacgagggggctggacttcgcctgtgacatctacatctgggcgcccttggccgggacttgtggggtccttctcctgtcactggttatcaccctttactgcaaacggggcagaaagaaactcctgtatatattcaaacaaccatttatgagaccagtacaaactactcaagaggaagatggctgtagctgccgatttccagaagaagaagaaggaggatgtgaactgagagtgaagttcagcaggagcgcagacgcccccgcgtaccagcagggccagaaccagctctataacgagctgaatctaggacgaagagaggagtacgatgttttggacaagagacgtggccgggaccctgagatggggggaaagccgagaaggaagaaccctcaggaaggcctgtacaatgaactgcagaaagataagatggcggaggcctacagtgagattgggatgaaaggcgagcgccggaggggcaaggggcacgatggcctttaccagggtctcagtacagccaccaaggacacctacgacgcccttcacatgcaggccctgccccctcgctaa

SEQ ID NO: 8672 - DNA, 1500 bp, synthetic construct
  source 1..1500: mol_type = other DNA
atggccttaccagtgaccgccttgctcctgccgctggccttgctgctccacgccgccaggccgcaggccgccgccgagaccctgagcgaggtggccggaggcagcggagacatccagatgacacagagccctagcagcctgtctgccagcgtgggagacagagtgaccatcacatgcaaggccagccaggatgtgggcacagccgtggattggtatcagcagaagcctggcaaggcccctaagctgctgatctactgggccagcacaagacacacaggcgtgcccagcagattttctggcagcggctctggcaccgacttcaccctgacaatatccagcctccagcctgaggacttcgccacctactactgccagcagtacaacagctaccctctgaccttcggccagggcaccaaggtggaaatcaaaagaggcggaggcggatctggcggcggaggtagcggtggcggaggatctgaagtgcagctggttgaatcaggtggcggcctggttcaacctggcggatctctgagactgagctgtgccgccagcggctacacctttaccgagtacacaatccactgggtccgacaggcccctggcaaaggacttgagtgggtcgccaacatcaaccccaacaatggcggcaccacctacaaccagaagttcgaggacagattcaccatcagccgggacaacagcaagaacaccctgtacctccagatgaactccctgagagccgaggacaccgccgtgtactattgtgccagaggctggaacttcgactactggggccagggaacactggtcaccgttagctctacgcgtaccacgacgccagcgccgcgaccaccaacaccggcgcccaccatcgcgtcgcagcccctgtccctgcgcccagaggcgtgccggccagcggcggggggcgcagtgcacacgagggggctggacttcgcctgtgacatctacatctgggcgcccttggccgggacttgtggggtccttctcctgtcactggttatcaccctttactgcaaacggggcagaaagaaactcctgtatatattcaaacaaccatttatgagaccagtacaaactactcaagaggaagatggctgtagctgccgatttccagaagaagaagaaggaggatgtgaactgagagtgaagttcagcaggagcgcagacgcccccgcgtaccagcagggccagaaccagctctataacgagctgaatctaggacgaagagaggagtacgatgttttggacaagagacgtggccgggaccctgagatggggggaaagccgagaaggaagaaccctcaggaaggcctgtacaatgaactgcagaaagataagatggcggaggcctacagtgagattgggatgaaaggcgagcgccggaggggcaaggggcacgatggcctttaccagggtctcagtacagccaccaaggacacctacgacgcccttcacatgcaggccctgccccctcgctaa

SEQ ID NO: 8673 - DNA, 1500 bp, synthetic construct
  source 1..1500: mol_type = other DNA
atggccttaccagtgaccgccttgctcctgccgctggccttgctgctccacgccgccaggccggtgagcggctggcgcctgttcaagaagatcagcggaggcagcggagacatccagatgacacagagccctagcagcctgtctgccagcgtgggagacagagtgaccatcacatgcaaggccagccaggatgtgggcacagccgtggattggtatcagcagaagcctggcaaggcccctaagctgctgatctactgggccagcacaagacacacaggcgtgcccagcagattttctggcagcggctctggcaccgacttcaccctgacaatatccagcctccagcctgaggacttcgccacctactactgccagcagtacaacagctaccctctgaccttcggccagggcaccaaggtggaaatcaaaagaggcggaggcggatctggcggcggaggtagcggtggcggaggatctgaagtgcagctggttgaatcaggtggcggcctggttcaacctggcggatctctgagactgagctgtgccgccagcggctacacctttaccgagtacacaatccactgggtccgacaggcccctggcaaaggacttgagtgggtcgccaacatcaaccccaacaatggcggcaccacctacaaccagaagttcgaggacagattcaccatcagccgggacaacagcaagaacaccctgtacctccagatgaactccctgagagccgaggacaccgccgtgtactattgtgccagaggctggaacttcgactactggggccagggaacactggtcaccgttagctctacgcgtaccacgacgccagcgccgcgaccaccaacaccggcgcccaccatcgcgtcgcagcccctgtccctgcgcccagaggcgtgccggccagcggcggggggcgcagtgcacacgagggggctggacttcgcctgtgacatctacatctgggcgcccttggccgggacttgtggggtccttctcctgtcactggttatcaccctttactgcaaacggggcagaaagaaactcctgtatatattcaaacaaccatttatgagaccagtacaaactactcaagaggaagatggctgtagctgccgatttccagaagaagaagaaggaggatgtgaactgagagtgaagttcagcaggagcgcagacgcccccgcgtaccagcagggccagaaccagctctataacgagctgaatctaggacgaagagaggagtacgatgttttggacaagagacgtggccgggaccctgagatggggggaaagccgagaaggaagaaccctcaggaaggcctgtacaatgaactgcagaaagataagatggcggaggcctacagtgagattgggatgaaaggcgagcgccggaggggcaaggggcacgatggcctttaccagggtctcagtacagccaccaaggacacctacgacgcccttcacatgcaggccctgccccctcgctaa

SEQ ID NO: 8674 - DNA, 1494 bp, synthetic construct
  source 1..1494: mol_type = other DNA
atggccttaccagtgaccgccttgctcctgccgctggccttgctgctccacgccgccaggccgcaggccgccgccgagaccctgagcgagggaggcagcggagacatccagatgacacagagccctagcagcctgtctgccagcgtgggagacagagtgaccatcacatgcaaggccagccaggatgtgggcacagccgtggattggtatcagcagaagcctggcaaggcccctaagctgctgatctactgggccagcacaagacacacaggcgtgcccagcagattttctggcagcggctctggcaccgacttcaccctgacaatatccagcctccagcctgaggacttcgccacctactactgccagcagtacaacagctaccctctgaccttcggccagggcaccaaggtggaaatcaaaagaggcggaggcggatctggcggcggaggtagcggtggcggaggatctgaagtgcagctggttgaatcaggtggcggcctggttcaacctggcggatctctgagactgagctgtgccgccagcggctacacctttaccgagtacacaatccactgggtccgacaggcccctggcaaaggacttgagtgggtcgccaacatcaaccccaacaatggcggcaccacctacaaccagaagttcgaggacagattcaccatcagccgggacaacagcaagaacaccctgtacctccagatgaactccctgagagccgaggacaccgccgtgtactattgtgccagaggctggaacttcgactactggggccagggaacactggtcaccgttagctctacgcgtaccacgacgccagcgccgcgaccaccaacaccggcgcccaccatcgcgtcgcagcccctgtccctgcgcccagaggcgtgccggccagcggcggggggcgcagtgcacacgagggggctggacttcgcctgtgacatctacatctgggcgcccttggccgggacttgtggggtccttctcctgtcactggttatcaccctttactgcaaacggggcagaaagaaactcctgtatatattcaaacaaccatttatgagaccagtacaaactactcaagaggaagatggctgtagctgccgatttccagaagaagaagaaggaggatgtgaactgagagtgaagttcagcaggagcgcagacgcccccgcgtaccagcagggccagaaccagctctataacgagctgaatctaggacgaagagaggagtacgatgttttggacaagagacgtggccgggaccctgagatggggggaaagccgagaaggaagaaccctcaggaaggcctgtacaatgaactgcagaaagataagatggcggaggcctacagtgagattgggatgaaaggcgagcgccggaggggcaaggggcacgatggcctttaccagggtctcagtacagccaccaaggacacctacgacgcccttcacatgcaggccctgccccctcgctaa

SEQ ID NO: 8675 - DNA, 1491 bp, synthetic construct
  source 1..1491: mol_type = other DNA
atggccttaccagtgaccgccttgctcctgccgctggccttgctgctccacgccgccaggccggccgccgccgagaccctgagcgagggaggcagcggagacatccagatgacacagagccctagcagcctgtctgccagcgtgggagacagagtgaccatcacatgcaaggccagccaggatgtgggcacagccgtggattggtatcagcagaagcctggcaaggcccctaagctgctgatctactgggccagcacaagacacacaggcgtgcccagcagattttctggcagcggctctggcaccgacttcaccctgacaatatccagcctccagcctgaggacttcgccacctactactgccagcagtacaacagctaccctctgaccttcggccagggcaccaaggtggaaatcaaaagaggcggaggcggatctggcggcggaggtagcggtggcggaggatctgaagtgcagctggttgaatcaggtggcggcctggttcaacctggcggatctctgagactgagctgtgccgccagcggctacacctttaccgagtacacaatccactgggtccgacaggcccctggcaaaggacttgagtgggtcgccaacatcaaccccaacaatggcggcaccacctacaaccagaagttcgaggacagattcaccatcagccgggacaacagcaagaacaccctgtacctccagatgaactccctgagagccgaggacaccgccgtgtactattgtgccagaggctggaacttcgactactggggccagggaacactggtcaccgttagctctacgcgtaccacgacgccagcgccgcgaccaccaacaccggcgcccaccatcgcgtcgcagcccctgtccctgcgcccagaggcgtgccggccagcggcggggggcgcagtgcacacgagggggctggacttcgcctgtgacatctacatctgggcgcccttggccgggacttgtggggtccttctcctgtcactggttatcaccctttactgcaaacggggcagaaagaaactcctgtatatattcaaacaaccatttatgagaccagtacaaactactcaagaggaagatggctgtagctgccgatttccagaagaagaagaaggaggatgtgaactgagagtgaagttcagcaggagcgcagacgcccccgcgtaccagcagggccagaaccagctctataacgagctgaatctaggacgaagagaggagtacgatgttttggacaagagacgtggccgggaccctgagatggggggaaagccgagaaggaagaaccctcaggaaggcctgtacaatgaactgcagaaagataagatggcggaggcctacagtgagattgggatgaaaggcgagcgccggaggggcaaggggcacgatggcctttaccagggtctcagtacagccaccaaggacacctacgacgcccttcacatgcaggccctgccccctcgctaa

SEQ ID NO: 8676 - DNA, 1488 bp, synthetic construct
  source 1..1488: mol_type = other DNA
atggccttaccagtgaccgccttgctcctgccgctggccttgctgctccacgccgccaggccggccgcccagcccaacaacagcggaggcagcggagacatccagatgacacagagccctagcagcctgtctgccagcgtgggagacagagtgaccatcacatgcaaggccagccaggatgtgggcacagccgtggattggtatcagcagaagcctggcaaggcccctaagctgctgatctactgggccagcacaagacacacaggcgtgcccagcagattttctggcagcggctctggcaccgacttcaccctgacaatatccagcctccagcctgaggacttcgccacctactactgccagcagtacaacagctaccctctgaccttcggccagggcaccaaggtggaaatcaaaagaggcggaggcggatctggcggcggaggtagcggtggcggaggatctgaagtgcagctggttgaatcaggtggcggcctggttcaacctggcggatctctgagactgagctgtgccgccagcggctacacctttaccgagtacacaatccactgggtccgacaggcccctggcaaaggacttgagtgggtcgccaacatcaaccccaacaatggcggcaccacctacaaccagaagttcgaggacagattcaccatcagccgggacaacagcaagaacaccctgtacctccagatgaactccctgagagccgaggacaccgccgtgtactattgtgccagaggctggaacttcgactactggggccagggaacactggtcaccgttagctctacgcgtaccacgacgccagcgccgcgaccaccaacaccggcgcccaccatcgcgtcgcagcccctgtccctgcgcccagaggcgtgccggccagcggcggggggcgcagtgcacacgagggggctggacttcgcctgtgacatctacatctgggcgcccttggccgggacttgtggggtccttctcctgtcactggttatcaccctttactgcaaacggggcagaaagaaactcctgtatatattcaaacaaccatttatgagaccagtacaaactactcaagaggaagatggctgtagctgccgatttccagaagaagaagaaggaggatgtgaactgagagtgaagttcagcaggagcgcagacgcccccgcgtaccagcagggccagaaccagctctataacgagctgaatctaggacgaagagaggagtacgatgttttggacaagagacgtggccgggaccctgagatggggggaaagccgagaaggaagaaccctcaggaaggcctgtacaatgaactgcagaaagataagatggcggaggcctacagtgagattgggatgaaaggcgagcgccggaggggcaaggggcacgatggcctttaccagggtctcagtacagccaccaaggacacctacgacgcccttcacatgcaggccctgccccctcgctaa

SEQ ID NO: 8677 - DNA, 1488 bp, synthetic construct
  source 1..1488: mol_type = other DNA
atggccttaccagtgaccgccttgctcctgccgctggccttgctgctccacgccgccaggccgtgggtgagccagccccccgagggaggcagcggagacatccagatgacacagagccctagcagcctgtctgccagcgtgggagacagagtgaccatcacatgcaaggccagccaggatgtgggcacagccgtggattggtatcagcagaagcctggcaaggcccctaagctgctgatctactgggccagcacaagacacacaggcgtgcccagcagattttctggcagcggctctggcaccgacttcaccctgacaatatccagcctccagcctgaggacttcgccacctactactgccagcagtacaacagctaccctctgaccttcggccagggcaccaaggtggaaatcaaaagaggcggaggcggatctggcggcggaggtagcggtggcggaggatctgaagtgcagctggttgaatcaggtggcggcctggttcaacctggcggatctctgagactgagctgtgccgccagcggctacacctttaccgagtacacaatccactgggtccgacaggcccctggcaaaggacttgagtgggtcgccaacatcaaccccaacaatggcggcaccacctacaaccagaagttcgaggacagattcaccatcagccgggacaacagcaagaacaccctgtacctccagatgaactccctgagagccgaggacaccgccgtgtactattgtgccagaggctggaacttcgactactggggccagggaacactggtcaccgttagctctacgcgtaccacgacgccagcgccgcgaccaccaacaccggcgcccaccatcgcgtcgcagcccctgtccctgcgcccagaggcgtgccggccagcggcggggggcgcagtgcacacgagggggctggacttcgcctgtgacatctacatctgggcgcccttggccgggacttgtggggtccttctcctgtcactggttatcaccctttactgcaaacggggcagaaagaaactcctgtatatattcaaacaaccatttatgagaccagtacaaactactcaagaggaagatggctgtagctgccgatttccagaagaagaagaaggaggatgtgaactgagagtgaagttcagcaggagcgcagacgcccccgcgtaccagcagggccagaaccagctctataacgagctgaatctaggacgaagagaggagtacgatgttttggacaagagacgtggccgggaccctgagatggggggaaagccgagaaggaagaaccctcaggaaggcctgtacaatgaactgcagaaagataagatggcggaggcctacagtgagattgggatgaaaggcgagcgccggaggggcaaggggcacgatggcctttaccagggtctcagtacagccaccaaggacacctacgacgcccttcacatgcaggccctgccccctcgctaa

SEQ ID NO: 8678 - DNA, 1491 bp, synthetic construct
  source 1..1491: mol_type = other DNA
atggccttaccagtgaccgccttgctcctgccgctggccttgctgctccacgccgccaggccgcagcagcagaccctgcccaagcccggaggcagcggagacatccagatgacacagagccctagcagcctgtctgccagcgtgggagacagagtgaccatcacatgcaaggccagccaggatgtgggcacagccgtggattggtatcagcagaagcctggcaaggcccctaagctgctgatctactgggccagcacaagacacacaggcgtgcccagcagattttctggcagcggctctggcaccgacttcaccctgacaatatccagcctccagcctgaggacttcgccacctactactgccagcagtacaacagctaccctctgaccttcggccagggcaccaaggtggaaatcaaaagaggcggaggcggatctggcggcggaggtagcggtggcggaggatctgaagtgcagctggttgaatcaggtggcggcctggttcaacctggcggatctctgagactgagctgtgccgccagcggctacacctttaccgagtacacaatccactgggtccgacaggcccctggcaaaggacttgagtgggtcgccaacatcaaccccaacaatggcggcaccacctacaaccagaagttcgaggacagattcaccatcagccgggacaacagcaagaacaccctgtacctccagatgaactccctgagagccgaggacaccgccgtgtactattgtgccagaggctggaacttcgactactggggccagggaacactggtcaccgttagctctacgcgtaccacgacgccagcgccgcgaccaccaacaccggcgcccaccatcgcgtcgcagcccctgtccctgcgcccagaggcgtgccggccagcggcggggggcgcagtgcacacgagggggctggacttcgcctgtgacatctacatctgggcgcccttggccgggacttgtggggtccttctcctgtcactggttatcaccctttactgcaaacggggcagaaagaaactcctgtatatattcaaacaaccatttatgagaccagtacaaactactcaagaggaagatggctgtagctgccgatttccagaagaagaagaaggaggatgtgaactgagagtgaagttcagcaggagcgcagacgcccccgcgtaccagcagggccagaaccagctctataacgagctgaatctaggacgaagagaggagtacgatgttttggacaagagacgtggccgggaccctgagatggggggaaagccgagaaggaagaaccctcaggaaggcctgtacaatgaactgcagaaagataagatggcggaggcctacagtgagattgggatgaaaggcgagcgccggaggggcaaggggcacgatggcctttaccagggtctcagtacagccaccaaggacacctacgacgcccttcacatgcaggccctgccccctcgctaa

SEQ ID NO: 8679 - DNA, 1485 bp, synthetic construct
  source 1..1485: mol_type = other DNA
atggccttaccagtgaccgccttgctcctgccgctggccttgctgctccacgccgccaggccgcagagcaaggcccaggtgggaggcagcggagacatccagatgacacagagccctagcagcctgtctgccagcgtgggagacagagtgaccatcacatgcaaggccagccaggatgtgggcacagccgtggattggtatcagcagaagcctggcaaggcccctaagctgctgatctactgggccagcacaagacacacaggcgtgcccagcagattttctggcagcggctctggcaccgacttcaccctgacaatatccagcctccagcctgaggacttcgccacctactactgccagcagtacaacagctaccctctgaccttcggccagggcaccaaggtggaaatcaaaagaggcggaggcggatctggcggcggaggtagcggtggcggaggatctgaagtgcagctggttgaatcaggtggcggcctggttcaacctggcggatctctgagactgagctgtgccgccagcggctacacctttaccgagtacacaatccactgggtccgacaggcccctggcaaaggacttgagtgggtcgccaacatcaaccccaacaatggcggcaccacctacaaccagaagttcgaggacagattcaccatcagccgggacaacagcaagaacaccctgtacctccagatgaactccctgagagccgaggacaccgccgtgtactattgtgccagaggctggaacttcgactactggggccagggaacactggtcaccgttagctctacgcgtaccacgacgccagcgccgcgaccaccaacaccggcgcccaccatcgcgtcgcagcccctgtccctgcgcccagaggcgtgccggccagcggcggggggcgcagtgcacacgagggggctggacttcgcctgtgacatctacatctgggcgcccttggccgggacttgtggggtccttctcctgtcactggttatcaccctttactgcaaacggggcagaaagaaactcctgtatatattcaaacaaccatttatgagaccagtacaaactactcaagaggaagatggctgtagctgccgatttccagaagaagaagaaggaggatgtgaactgagagtgaagttcagcaggagcgcagacgcccccgcgtaccagcagggccagaaccagctctataacgagctgaatctaggacgaagagaggagtacgatgttttggacaagagacgtggccgggaccctgagatggggggaaagccgagaaggaagaaccctcaggaaggcctgtacaatgaactgcagaaagataagatggcggaggcctacagtgagattgggatgaaaggcgagcgccggaggggcaaggggcacgatggcctttaccagggtctcagtacagccaccaaggacacctacgacgcccttcacatgcaggccctgccccctcgctaa

SEQ ID NO: 8680 - DNA, 1491 bp, synthetic construct
  source 1..1491: mol_type = other DNA
atggccttaccagtgaccgccttgctcctgccgctggccttgctgctccacgccgccaggccgcgcaccgaggacctgcccaaggccggaggcagcggagacatccagatgacacagagccctagcagcctgtctgccagcgtgggagacagagtgaccatcacatgcaaggccagccaggatgtgggcacagccgtggattggtatcagcagaagcctggcaaggcccctaagctgctgatctactgggccagcacaagacacacaggcgtgcccagcagattttctggcagcggctctggcaccgacttcaccctgacaatatccagcctccagcctgaggacttcgccacctactactgccagcagtacaacagctaccctctgaccttcggccagggcaccaaggtggaaatcaaaagaggcggaggcggatctggcggcggaggtagcggtggcggaggatctgaagtgcagctggttgaatcaggtggcggcctggttcaacctggcggatctctgagactgagctgtgccgccagcggctacacctttaccgagtacacaatccactgggtccgacaggcccctggcaaaggacttgagtgggtcgccaacatcaaccccaacaatggcggcaccacctacaaccagaagttcgaggacagattcaccatcagccgggacaacagcaagaacaccctgtacctccagatgaactccctgagagccgaggacaccgccgtgtactattgtgccagaggctggaacttcgactactggggccagggaacactggtcaccgttagctctacgcgtaccacgacgccagcgccgcgaccaccaacaccggcgcccaccatcgcgtcgcagcccctgtccctgcgcccagaggcgtgccggccagcggcggggggcgcagtgcacacgagggggctggacttcgcctgtgacatctacatctgggcgcccttggccgggacttgtggggtccttctcctgtcactggttatcaccctttactgcaaacggggcagaaagaaactcctgtatatattcaaacaaccatttatgagaccagtacaaactactcaagaggaagatggctgtagctgccgatttccagaagaagaagaaggaggatgtgaactgagagtgaagttcagcaggagcgcagacgcccccgcgtaccagcagggccagaaccagctctataacgagctgaatctaggacgaagagaggagtacgatgttttggacaagagacgtggccgggaccctgagatggggggaaagccgagaaggaagaaccctcaggaaggcctgtacaatgaactgcagaaagataagatggcggaggcctacagtgagattgggatgaaaggcgagcgccggaggggcaaggggcacgatggcctttaccagggtctcagtacagccaccaaggacacctacgacgcccttcacatgcaggccctgccccctcgctaa

SEQ ID NO: 8681 - DNA, 1491 bp, synthetic construct
  source 1..1491: mol_type = other DNA
atggccttaccagtgaccgccttgctcctgccgctggccttgctgctccacgccgccaggccgatgcccatctggaagttccccgacggaggcagcggagacatccagatgacacagagccctagcagcctgtctgccagcgtgggagacagagtgaccatcacatgcaaggccagccaggatgtgggcacagccgtggattggtatcagcagaagcctggcaaggcccctaagctgctgatctactgggccagcacaagacacacaggcgtgcccagcagattttctggcagcggctctggcaccgacttcaccctgacaatatccagcctccagcctgaggacttcgccacctactactgccagcagtacaacagctaccctctgaccttcggccagggcaccaaggtggaaatcaaaagaggcggaggcggatctggcggcggaggtagcggtggcggaggatctgaagtgcagctggttgaatcaggtggcggcctggttcaacctggcggatctctgagactgagctgtgccgccagcggctacacctttaccgagtacacaatccactgggtccgacaggcccctggcaaaggacttgagtgggtcgccaacatcaaccccaacaatggcggcaccacctacaaccagaagttcgaggacagattcaccatcagccgggacaacagcaagaacaccctgtacctccagatgaactccctgagagccgaggacaccgccgtgtactattgtgccagaggctggaacttcgactactggggccagggaacactggtcaccgttagctctacgcgtaccacgacgccagcgccgcgaccaccaacaccggcgcccaccatcgcgtcgcagcccctgtccctgcgcccagaggcgtgccggccagcggcggggggcgcagtgcacacgagggggctggacttcgcctgtgacatctacatctgggcgcccttggccgggacttgtggggtccttctcctgtcactggttatcaccctttactgcaaacggggcagaaagaaactcctgtatatattcaaacaaccatttatgagaccagtacaaactactcaagaggaagatggctgtagctgccgatttccagaagaagaagaaggaggatgtgaactgagagtgaagttcagcaggagcgcagacgcccccgcgtaccagcagggccagaaccagctctataacgagctgaatctaggacgaagagaggagtacgatgttttggacaagagacgtggccgggaccctgagatggggggaaagccgagaaggaagaaccctcaggaaggcctgtacaatgaactgcagaaagataagatggcggaggcctacagtgagattgggatgaaaggcgagcgccggaggggcaaggggcacgatggcctttaccagggtctcagtacagccaccaaggacacctacgacgcccttcacatgcaggccctgccccctcgctaa

SEQ ID NO: 8682 - DNA, 1488 bp, synthetic construct
  source 1..1488: mol_type = other DNA
atggccttaccagtgaccgccttgctcctgccgctggccttgctgctccacgccgccaggccgatgcccatctggaagttccccggaggcagcggagacatccagatgacacagagccctagcagcctgtctgccagcgtgggagacagagtgaccatcacatgcaaggccagccaggatgtgggcacagccgtggattggtatcagcagaagcctggcaaggcccctaagctgctgatctactgggccagcacaagacacacaggcgtgcccagcagattttctggcagcggctctggcaccgacttcaccctgacaatatccagcctccagcctgaggacttcgccacctactactgccagcagtacaacagctaccctctgaccttcggccagggcaccaaggtggaaatcaaaagaggcggaggcggatctggcggcggaggtagcggtggcggaggatctgaagtgcagctggttgaatcaggtggcggcctggttcaacctggcggatctctgagactgagctgtgccgccagcggctacacctttaccgagtacacaatccactgggtccgacaggcccctggcaaaggacttgagtgggtcgccaacatcaaccccaacaatggcggcaccacctacaaccagaagttcgaggacagattcaccatcagccgggacaacagcaagaacaccctgtacctccagatgaactccctgagagccgaggacaccgccgtgtactattgtgccagaggctggaacttcgactactggggccagggaacactggtcaccgttagctctacgcgtaccacgacgccagcgccgcgaccaccaacaccggcgcccaccatcgcgtcgcagcccctgtccctgcgcccagaggcgtgccggccagcggcggggggcgcagtgcacacgagggggctggacttcgcctgtgacatctacatctgggcgcccttggccgggacttgtggggtccttctcctgtcactggttatcaccctttactgcaaacggggcagaaagaaactcctgtatatattcaaacaaccatttatgagaccagtacaaactactcaagaggaagatggctgtagctgccgatttccagaagaagaagaaggaggatgtgaactgagagtgaagttcagcaggagcgcagacgcccccgcgtaccagcagggccagaaccagctctataacgagctgaatctaggacgaagagaggagtacgatgttttggacaagagacgtggccgggaccctgagatggggggaaagccgagaaggaagaaccctcaggaaggcctgtacaatgaactgcagaaagataagatggcggaggcctacagtgagattgggatgaaaggcgagcgccggaggggcaaggggcacgatggcctttaccagggtctcagtacagccaccaaggacacctacgacgcccttcacatgcaggccctgccccctcgctaa

SEQ ID NO: 8683 - DNA, 1485 bp, synthetic construct
  source 1..1485: mol_type = other DNA
atggccttaccagtgaccgccttgctcctgccgctggccttgctgctccacgccgccaggccgcccatctggaagttccccggaggcagcggagacatccagatgacacagagccctagcagcctgtctgccagcgtgggagacagagtgaccatcacatgcaaggccagccaggatgtgggcacagccgtggattggtatcagcagaagcctggcaaggcccctaagctgctgatctactgggccagcacaagacacacaggcgtgcccagcagattttctggcagcggctctggcaccgacttcaccctgacaatatccagcctccagcctgaggacttcgccacctactactgccagcagtacaacagctaccctctgaccttcggccagggcaccaaggtggaaatcaaaagaggcggaggcggatctggcggcggaggtagcggtggcggaggatctgaagtgcagctggttgaatcaggtggcggcctggttcaacctggcggatctctgagactgagctgtgccgccagcggctacacctttaccgagtacacaatccactgggtccgacaggcccctggcaaaggacttgagtgggtcgccaacatcaaccccaacaatggcggcaccacctacaaccagaagttcgaggacagattcaccatcagccgggacaacagcaagaacaccctgtacctccagatgaactccctgagagccgaggacaccgccgtgtactattgtgccagaggctggaacttcgactactggggccagggaacactggtcaccgttagctctacgcgtaccacgacgccagcgccgcgaccaccaacaccggcgcccaccatcgcgtcgcagcccctgtccctgcgcccagaggcgtgccggccagcggcggggggcgcagtgcacacgagggggctggacttcgcctgtgacatctacatctgggcgcccttggccgggacttgtggggtccttctcctgtcactggttatcaccctttactgcaaacggggcagaaagaaactcctgtatatattcaaacaaccatttatgagaccagtacaaactactcaagaggaagatggctgtagctgccgatttccagaagaagaagaaggaggatgtgaactgagagtgaagttcagcaggagcgcagacgcccccgcgtaccagcagggccagaaccagctctataacgagctgaatctaggacgaagagaggagtacgatgttttggacaagagacgtggccgggaccctgagatggggggaaagccgagaaggaagaaccctcaggaaggcctgtacaatgaactgcagaaagataagatggcggaggcctacagtgagattgggatgaaaggcgagcgccggaggggcaaggggcacgatggcctttaccagggtctcagtacagccaccaaggacacctacgacgcccttcacatgcaggccctgccccctcgctaa

SEQ ID NO: 8684 - DNA, 1482 bp, synthetic construct
  source 1..1482: mol_type = other DNA
atggccttaccagtgaccgccttgctcctgccgctggccttgctgctccacgccgccaggccgatctggaagttccccggaggcagcggagacatccagatgacacagagccctagcagcctgtctgccagcgtgggagacagagtgaccatcacatgcaaggccagccaggatgtgggcacagccgtggattggtatcagcagaagcctggcaaggcccctaagctgctgatctactgggccagcacaagacacacaggcgtgcccagcagattttctggcagcggctctggcaccgacttcaccctgacaatatccagcctccagcctgaggacttcgccacctactactgccagcagtacaacagctaccctctgaccttcggccagggcaccaaggtggaaatcaaaagaggcggaggcggatctggcggcggaggtagcggtggcggaggatctgaagtgcagctggttgaatcaggtggcggcctggttcaacctggcggatctctgagactgagctgtgccgccagcggctacacctttaccgagtacacaatccactgggtccgacaggcccctggcaaaggacttgagtgggtcgccaacatcaaccccaacaatggcggcaccacctacaaccagaagttcgaggacagattcaccatcagccgggacaacagcaagaacaccctgtacctccagatgaactccctgagagccgaggacaccgccgtgtactattgtgccagaggctggaacttcgactactggggccagggaacactggtcaccgttagctctacgcgtaccacgacgccagcgccgcgaccaccaacaccggcgcccaccatcgcgtcgcagcccctgtccctgcgcccagaggcgtgccggccagcggcggggggcgcagtgcacacgagggggctggacttcgcctgtgacatctacatctgggcgcccttggccgggacttgtggggtccttctcctgtcactggttatcaccctttactgcaaacggggcagaaagaaactcctgtatatattcaaacaaccatttatgagaccagtacaaactactcaagaggaagatggctgtagctgccgatttccagaagaagaagaaggaggatgtgaactgagagtgaagttcagcaggagcgcagacgcccccgcgtaccagcagggccagaaccagctctataacgagctgaatctaggacgaagagaggagtacgatgttttggacaagagacgtggccgggaccctgagatggggggaaagccgagaaggaagaaccctcaggaaggcctgtacaatgaactgcagaaagataagatggcggaggcctacagtgagattgggatgaaaggcgagcgccggaggggcaaggggcacgatggcctttaccagggtctcagtacagccaccaaggacacctacgacgcccttcacatgcaggccctgccccctcgctaa

SEQ ID NO: 8685 - DNA, 1488 bp, synthetic construct
  source 1..1488: mol_type = other DNA
atggccttaccagtgaccgccttgctcctgccgctggccttgctgctccacgccgccaggccgcccatctggaagttccccgacggaggcagcggagacatccagatgacacagagccctagcagcctgtctgccagcgtgggagacagagtgaccatcacatgcaaggccagccaggatgtgggcacagccgtggattggtatcagcagaagcctggcaaggcccctaagctgctgatctactgggccagcacaagacacacaggcgtgcccagcagattttctggcagcggctctggcaccgacttcaccctgacaatatccagcctccagcctgaggacttcgccacctactactgccagcagtacaacagctaccctctgaccttcggccagggcaccaaggtggaaatcaaaagaggcggaggcggatctggcggcggaggtagcggtggcggaggatctgaagtgcagctggttgaatcaggtggcggcctggttcaacctggcggatctctgagactgagctgtgccgccagcggctacacctttaccgagtacacaatccactgggtccgacaggcccctggcaaaggacttgagtgggtcgccaacatcaaccccaacaatggcggcaccacctacaaccagaagttcgaggacagattcaccatcagccgggacaacagcaagaacaccctgtacctccagatgaactccctgagagccgaggacaccgccgtgtactattgtgccagaggctggaacttcgactactggggccagggaacactggtcaccgttagctctacgcgtaccacgacgccagcgccgcgaccaccaacaccggcgcccaccatcgcgtcgcagcccctgtccctgcgcccagaggcgtgccggccagcggcggggggcgcagtgcacacgagggggctggacttcgcctgtgacatctacatctgggcgcccttggccgggacttgtggggtccttctcctgtcactggttatcaccctttactgcaaacggggcagaaagaaactcctgtatatattcaaacaaccatttatgagaccagtacaaactactcaagaggaagatggctgtagctgccgatttccagaagaagaagaaggaggatgtgaactgagagtgaagttcagcaggagcgcagacgcccccgcgtaccagcagggccagaaccagctctataacgagctgaatctaggacgaagagaggagtacgatgttttggacaagagacgtggccgggaccctgagatggggggaaagccgagaaggaagaaccctcaggaaggcctgtacaatgaactgcagaaagataagatggcggaggcctacagtgagattgggatgaaaggcgagcgccggaggggcaaggggcacgatggcctttaccagggtctcagtacagccaccaaggacacctacgacgcccttcacatgcaggccctgccccctcgctaa

SEQ ID NO: 8686 - DNA, 1515 bp, synthetic construct
  source 1..1515: mol_type = other DNA
atggccttaccagtgaccgccttgctcctgccgctggccttgctgctccacgccgccaggccggacctgagctacatgcccatctggaagttccccgacgaggagggcgccggaggcagcggagacatccagatgacacagagccctagcagcctgtctgccagcgtgggagacagagtgaccatcacatgcaaggccagccaggatgtgggcacagccgtggattggtatcagcagaagcctggcaaggcccctaagctgctgatctactgggccagcacaagacacacaggcgtgcccagcagattttctggcagcggctctggcaccgacttcaccctgacaatatccagcctccagcctgaggacttcgccacctactactgccagcagtacaacagctaccctctgaccttcggccagggcaccaaggtggaaatcaaaagaggcggaggcggatctggcggcggaggtagcggtggcggaggatctgaagtgcagctggttgaatcaggtggcggcctggttcaacctggcggatctctgagactgagctgtgccgccagcggctacacctttaccgagtacacaatccactgggtccgacaggcccctggcaaaggacttgagtgggtcgccaacatcaaccccaacaatggcggcaccacctacaaccagaagttcgaggacagattcaccatcagccgggacaacagcaagaacaccctgtacctccagatgaactccctgagagccgaggacaccgccgtgtactattgtgccagaggctggaacttcgactactggggccagggaacactggtcaccgttagctctacgcgtaccacgacgccagcgccgcgaccaccaacaccggcgcccaccatcgcgtcgcagcccctgtccctgcgcccagaggcgtgccggccagcggcggggggcgcagtgcacacgagggggctggacttcgcctgtgacatctacatctgggcgcccttggccgggacttgtggggtccttctcctgtcactggttatcaccctttactgcaaacggggcagaaagaaactcctgtatatattcaaacaaccatttatgagaccagtacaaactactcaagaggaagatggctgtagctgccgatttccagaagaagaagaaggaggatgtgaactgagagtgaagttcagcaggagcgcagacgcccccgcgtaccagcagggccagaaccagctctataacgagctgaatctaggacgaagagaggagtacgatgttttggacaagagacgtggccgggaccctgagatggggggaaagccgagaaggaagaaccctcaggaaggcctgtacaatgaactgcagaaagataagatggcggaggcctacagtgagattgggatgaaaggcgagcgccggaggggcaaggggcacgatggcctttaccagggtctcagtacagccaccaaggacacctacgacgcccttcacatgcaggccctgccccctcgctaa

SEQ ID NO: 8687 - DNA, 1512 bp, synthetic construct
  source 1..1512: mol_type = other DNA
atggccttaccagtgaccgccttgctcctgccgctggccttgctgctccacgccgccaggccgctgagctacatgcccatctggaagttccccgacgaggagggcgccggaggcagcggagacatccagatgacacagagccctagcagcctgtctgccagcgtgggagacagagtgaccatcacatgcaaggccagccaggatgtgggcacagccgtggattggtatcagcagaagcctggcaaggcccctaagctgctgatctactgggccagcacaagacacacaggcgtgcccagcagattttctggcagcggctctggcaccgacttcaccctgacaatatccagcctccagcctgaggacttcgccacctactactgccagcagtacaacagctaccctctgaccttcggccagggcaccaaggtggaaatcaaaagaggcggaggcggatctggcggcggaggtagcggtggcggaggatctgaagtgcagctggttgaatcaggtggcggcctggttcaacctggcggatctctgagactgagctgtgccgccagcggctacacctttaccgagtacacaatccactgggtccgacaggcccctggcaaaggacttgagtgggtcgccaacatcaaccccaacaatggcggcaccacctacaaccagaagttcgaggacagattcaccatcagccgggacaacagcaagaacaccctgtacctccagatgaactccctgagagccgaggacaccgccgtgtactattgtgccagaggctggaacttcgactactggggccagggaacactggtcaccgttagctctacgcgtaccacgacgccagcgccgcgaccaccaacaccggcgcccaccatcgcgtcgcagcccctgtccctgcgcccagaggcgtgccggccagcggcggggggcgcagtgcacacgagggggctggacttcgcctgtgacatctacatctgggcgcccttggccgggacttgtggggtccttctcctgtcactggttatcaccctttactgcaaacggggcagaaagaaactcctgtatatattcaaacaaccatttatgagaccagtacaaactactcaagaggaagatggctgtagctgccgatttccagaagaagaagaaggaggatgtgaactgagagtgaagttcagcaggagcgcagacgcccccgcgtaccagcagggccagaaccagctctataacgagctgaatctaggacgaagagaggagtacgatgttttggacaagagacgtggccgggaccctgagatggggggaaagccgagaaggaagaaccctcaggaaggcctgtacaatgaactgcagaaagataagatggcggaggcctacagtgagattgggatgaaaggcgagcgccggaggggcaaggggcacgatggcctttaccagggtctcagtacagccaccaaggacacctacgacgcccttcacatgcaggccctgccccctcgctaa

SEQ ID NO: 8688 - DNA, 1509 bp, synthetic construct
  source 1..1509: mol_type = other DNA
atggccttaccagtgaccgccttgctcctgccgctggccttgctgctccacgccgccaggccgagctacatgcccatctggaagttccccgacgaggagggcgccggaggcagcggagacatccagatgacacagagccctagcagcctgtctgccagcgtgggagacagagtgaccatcacatgcaaggccagccaggatgtgggcacagccgtggattggtatcagcagaagcctggcaaggcccctaagctgctgatctactgggccagcacaagacacacaggcgtgcccagcagattttctggcagcggctctggcaccgacttcaccctgacaatatccagcctccagcctgaggacttcgccacctactactgccagcagtacaacagctaccctctgaccttcggccagggcaccaaggtggaaatcaaaagaggcggaggcggatctggcggcggaggtagcggtggcggaggatctgaagtgcagctggttgaatcaggtggcggcctggttcaacctggcggatctctgagactgagctgtgccgccagcggctacacctttaccgagtacacaatccactgggtccgacaggcccctggcaaaggacttgagtgggtcgccaacatcaaccccaacaatggcggcaccacctacaaccagaagttcgaggacagattcaccatcagccgggacaacagcaagaacaccctgtacctccagatgaactccctgagagccgaggacaccgccgtgtactattgtgccagaggctggaacttcgactactggggccagggaacactggtcaccgttagctctacgcgtaccacgacgccagcgccgcgaccaccaacaccggcgcccaccatcgcgtcgcagcccctgtccctgcgcccagaggcgtgccggccagcggcggggggcgcagtgcacacgagggggctggacttcgcctgtgacatctacatctgggcgcccttggccgggacttgtggggtccttctcctgtcactggttatcaccctttactgcaaacggggcagaaagaaactcctgtatatattcaaacaaccatttatgagaccagtacaaactactcaagaggaagatggctgtagctgccgatttccagaagaagaagaaggaggatgtgaactgagagtgaagttcagcaggagcgcagacgcccccgcgtaccagcagggccagaaccagctctataacgagctgaatctaggacgaagagaggagtacgatgttttggacaagagacgtggccgggaccctgagatggggggaaagccgagaaggaagaaccctcaggaaggcctgtacaatgaactgcagaaagataagatggcggaggcctacagtgagattgggatgaaaggcgagcgccggaggggcaaggggcacgatggcctttaccagggtctcagtacagccaccaaggacacctacgacgcccttcacatgcaggccctgccccctcgctaa

SEQ ID NO: 8689 - DNA, 1506 bp, synthetic construct
  source 1..1506: mol_type = other DNA
atggccttaccagtgaccgccttgctcctgccgctggccttgctgctccacgccgccaggccgtacatgcccatctggaagttccccgacgaggagggcgccggaggcagcggagacatccagatgacacagagccctagcagcctgtctgccagcgtgggagacagagtgaccatcacatgcaaggccagccaggatgtgggcacagccgtggattggtatcagcagaagcctggcaaggcccctaagctgctgatctactgggccagcacaagacacacaggcgtgcccagcagattttctggcagcggctctggcaccgacttcaccctgacaatatccagcctccagcctgaggacttcgccacctactactgccagcagtacaacagctaccctctgaccttcggccagggcaccaaggtggaaatcaaaagaggcggaggcggatctggcggcggaggtagcggtggcggaggatctgaagtgcagctggttgaatcaggtggcggcctggttcaacctggcggatctctgagactgagctgtgccgccagcggctacacctttaccgagtacacaatccactgggtccgacaggcccctggcaaaggacttgagtgggtcgccaacatcaaccccaacaatggcggcaccacctacaaccagaagttcgaggacagattcaccatcagccgggacaacagcaagaacaccctgtacctccagatgaactccctgagagccgaggacaccgccgtgtactattgtgccagaggctggaacttcgactactggggccagggaacactggtcaccgttagctctacgcgtaccacgacgccagcgccgcgaccaccaacaccggcgcccaccatcgcgtcgcagcccctgtccctgcgcccagaggcgtgccggccagcggcggggggcgcagtgcacacgagggggctggacttcgcctgtgacatctacatctgggcgcccttggccgggacttgtggggtccttctcctgtcactggttatcaccctttactgcaaacggggcagaaagaaactcctgtatatattcaaacaaccatttatgagaccagtacaaactactcaagaggaagatggctgtagctgccgatttccagaagaagaagaaggaggatgtgaactgagagtgaagttcagcaggagcgcagacgcccccgcgtaccagcagggccagaaccagctctataacgagctgaatctaggacgaagagaggagtacgatgttttggacaagagacgtggccgggaccctgagatggggggaaagccgagaaggaagaaccctcaggaaggcctgtacaatgaactgcagaaagataagatggcggaggcctacagtgagattgggatgaaaggcgagcgccggaggggcaaggggcacgatggcctttaccagggtctcagtacagccaccaaggacacctacgacgcccttcacatgcaggccctgccccctcgctaa

SEQ ID NO: 8690 - DNA, 1500 bp, synthetic construct
  source 1..1500: mol_type = other DNA
atggccttaccagtgaccgccttgctcctgccgctggccttgctgctccacgccgccaggccgtacatgcccatctggaagttccccgacgaggagggaggcagcggagacatccagatgacacagagccctagcagcctgtctgccagcgtgggagacagagtgaccatcacatgcaaggccagccaggatgtgggcacagccgtggattggtatcagcagaagcctggcaaggcccctaagctgctgatctactgggccagcacaagacacacaggcgtgcccagcagattttctggcagcggctctggcaccgacttcaccctgacaatatccagcctccagcctgaggacttcgccacctactactgccagcagtacaacagctaccctctgaccttcggccagggcaccaaggtggaaatcaaaagaggcggaggcggatctggcggcggaggtagcggtggcggaggatctgaagtgcagctggttgaatcaggtggcggcctggttcaacctggcggatctctgagactgagctgtgccgccagcggctacacctttaccgagtacacaatccactgggtccgacaggcccctggcaaaggacttgagtgggtcgccaacatcaaccccaacaatggcggcaccacctacaaccagaagttcgaggacagattcaccatcagccgggacaacagcaagaacaccctgtacctccagatgaactccctgagagccgaggacaccgccgtgtactattgtgccagaggctggaacttcgactactggggccagggaacactggtcaccgttagctctacgcgtaccacgacgccagcgccgcgaccaccaacaccggcgcccaccatcgcgtcgcagcccctgtccctgcgcccagaggcgtgccggccagcggcggggggcgcagtgcacacgagggggctggacttcgcctgtgacatctacatctgggcgcccttggccgggacttgtggggtccttctcctgtcactggttatcaccctttactgcaaacggggcagaaagaaactcctgtatatattcaaacaaccatttatgagaccagtacaaactactcaagaggaagatggctgtagctgccgatttccagaagaagaagaaggaggatgtgaactgagagtgaagttcagcaggagcgcagacgcccccgcgtaccagcagggccagaaccagctctataacgagctgaatctaggacgaagagaggagtacgatgttttggacaagagacgtggccgggaccctgagatggggggaaagccgagaaggaagaaccctcaggaaggcctgtacaatgaactgcagaaagataagatggcggaggcctacagtgagattgggatgaaaggcgagcgccggaggggcaaggggcacgatggcctttaccagggtctcagtacagccaccaaggacacctacgacgcccttcacatgcaggccctgccccctcgctaa

SEQ ID NO: 8691 - DNA, 1503 bp, synthetic construct
  source 1..1503: mol_type = other DNA
atggccttaccagtgaccgccttgctcctgccgctggccttgctgctccacgccgccaggccgaacaacaccctggtgtggaagtacgccgacgccggcggaggcagcggagacatccagatgacacagagccctagcagcctgtctgccagcgtgggagacagagtgaccatcacatgcaaggccagccaggatgtgggcacagccgtggattggtatcagcagaagcctggcaaggcccctaagctgctgatctactgggccagcacaagacacacaggcgtgcccagcagattttctggcagcggctctggcaccgacttcaccctgacaatatccagcctccagcctgaggacttcgccacctactactgccagcagtacaacagctaccctctgaccttcggccagggcaccaaggtggaaatcaaaagaggcggaggcggatctggcggcggaggtagcggtggcggaggatctgaagtgcagctggttgaatcaggtggcggcctggttcaacctggcggatctctgagactgagctgtgccgccagcggctacacctttaccgagtacacaatccactgggtccgacaggcccctggcaaaggacttgagtgggtcgccaacatcaaccccaacaatggcggcaccacctacaaccagaagttcgaggacagattcaccatcagccgggacaacagcaagaacaccctgtacctccagatgaactccctgagagccgaggacaccgccgtgtactattgtgccagaggctggaacttcgactactggggccagggaacactggtcaccgttagctctacgcgtaccacgacgccagcgccgcgaccaccaacaccggcgcccaccatcgcgtcgcagcccctgtccctgcgcccagaggcgtgccggccagcggcggggggcgcagtgcacacgagggggctggacttcgcctgtgacatctacatctgggcgcccttggccgggacttgtggggtccttctcctgtcactggttatcaccctttactgcaaacggggcagaaagaaactcctgtatatattcaaacaaccatttatgagaccagtacaaactactcaagaggaagatggctgtagctgccgatttccagaagaagaagaaggaggatgtgaactgagagtgaagttcagcaggagcgcagacgcccccgcgtaccagcagggccagaaccagctctataacgagctgaatctaggacgaagagaggagtacgatgttttggacaagagacgtggccgggaccctgagatggggggaaagccgagaaggaagaaccctcaggaaggcctgtacaatgaactgcagaaagataagatggcggaggcctacagtgagattgggatgaaaggcgagcgccggaggggcaaggggcacgatggcctttaccagggtctcagtacagccaccaaggacacctacgacgcccttcacatgcaggccctgccccctcgctaa

SEQ ID NO: 8692 - DNA, 1500 bp, synthetic construct
  source 1..1500: mol_type = other DNA
atggccttaccagtgaccgccttgctcctgccgctggccttgctgctccacgccgccaggccgaacaccctggtgtggaagtacgccgacgccggcggaggcagcggagacatccagatgacacagagccctagcagcctgtctgccagcgtgggagacagagtgaccatcacatgcaaggccagccaggatgtgggcacagccgtggattggtatcagcagaagcctggcaaggcccctaagctgctgatctactgggccagcacaagacacacaggcgtgcccagcagattttctggcagcggctctggcaccgacttcaccctgacaatatccagcctccagcctgaggacttcgccacctactactgccagcagtacaacagctaccctctgaccttcggccagggcaccaaggtggaaatcaaaagaggcggaggcggatctggcggcggaggtagcggtggcggaggatctgaagtgcagctggttgaatcaggtggcggcctggttcaacctggcggatctctgagactgagctgtgccgccagcggctacacctttaccgagtacacaatccactgggtccgacaggcccctggcaaaggacttgagtgggtcgccaacatcaaccccaacaatggcggcaccacctacaaccagaagttcgaggacagattcaccatcagccgggacaacagcaagaacaccctgtacctccagatgaactccctgagagccgaggacaccgccgtgtactattgtgccagaggctggaacttcgactactggggccagggaacactggtcaccgttagctctacgcgtaccacgacgccagcgccgcgaccaccaacaccggcgcccaccatcgcgtcgcagcccctgtccctgcgcccagaggcgtgccggccagcggcggggggcgcagtgcacacgagggggctggacttcgcctgtgacatctacatctgggcgcccttggccgggacttgtggggtccttctcctgtcactggttatcaccctttactgcaaacggggcagaaagaaactcctgtatatattcaaacaaccatttatgagaccagtacaaactactcaagaggaagatggctgtagctgccgatttccagaagaagaagaaggaggatgtgaactgagagtgaagttcagcaggagcgcagacgcccccgcgtaccagcagggccagaaccagctctataacgagctgaatctaggacgaagagaggagtacgatgttttggacaagagacgtggccgggaccctgagatggggggaaagccgagaaggaagaaccctcaggaaggcctgtacaatgaactgcagaaagataagatggcggaggcctacagtgagattgggatgaaaggcgagcgccggaggggcaaggggcacgatggcctttaccagggtctcagtacagccaccaaggacacctacgacgcccttcacatgcaggccctgccccctcgctaa

SEQ ID NO: 8693 - DNA, 1497 bp, synthetic construct
  source 1..1497: mol_type = other DNA
atggccttaccagtgaccgccttgctcctgccgctggccttgctgctccacgccgccaggccgaccctggtgtggaagtacgccgacgccggcggaggcagcggagacatccagatgacacagagccctagcagcctgtctgccagcgtgggagacagagtgaccatcacatgcaaggccagccaggatgtgggcacagccgtggattggtatcagcagaagcctggcaaggcccctaagctgctgatctactgggccagcacaagacacacaggcgtgcccagcagattttctggcagcggctctggcaccgacttcaccctgacaatatccagcctccagcctgaggacttcgccacctactactgccagcagtacaacagctaccctctgaccttcggccagggcaccaaggtggaaatcaaaagaggcggaggcggatctggcggcggaggtagcggtggcggaggatctgaagtgcagctggttgaatcaggtggcggcctggttcaacctggcggatctctgagactgagctgtgccgccagcggctacacctttaccgagtacacaatccactgggtccgacaggcccctggcaaaggacttgagtgggtcgccaacatcaaccccaacaatggcggcaccacctacaaccagaagttcgaggacagattcaccatcagccgggacaacagcaagaacaccctgtacctccagatgaactccctgagagccgaggacaccgccgtgtactattgtgccagaggctggaacttcgactactggggccagggaacactggtcaccgttagctctacgcgtaccacgacgccagcgccgcgaccaccaacaccggcgcccaccatcgcgtcgcagcccctgtccctgcgcccagaggcgtgccggccagcggcggggggcgcagtgcacacgagggggctggacttcgcctgtgacatctacatctgggcgcccttggccgggacttgtggggtccttctcctgtcactggttatcaccctttactgcaaacggggcagaaagaaactcctgtatatattcaaacaaccatttatgagaccagtacaaactactcaagaggaagatggctgtagctgccgatttccagaagaagaagaaggaggatgtgaactgagagtgaagttcagcaggagcgcagacgcccccgcgtaccagcagggccagaaccagctctataacgagctgaatctaggacgaagagaggagtacgatgttttggacaagagacgtggccgggaccctgagatggggggaaagccgagaaggaagaaccctcaggaaggcctgtacaatgaactgcagaaagataagatggcggaggcctacagtgagattgggatgaaaggcgagcgccggaggggcaaggggcacgatggcctttaccagggtctcagtacagccaccaaggacacctacgacgcccttcacatgcaggccctgccccctcgctaa

SEQ ID NO: 8694 - DNA, 1491 bp, synthetic construct
  source 1..1491: mol_type = other DNA
atggccttaccagtgaccgccttgctcctgccgctggccttgctgctccacgccgccaggccggtgtggaagtacgccgacgccggcggaggcagcggagacatccagatgacacagagccctagcagcctgtctgccagcgtgggagacagagtgaccatcacatgcaaggccagccaggatgtgggcacagccgtggattggtatcagcagaagcctggcaaggcccctaagctgctgatctactgggccagcacaagacacacaggcgtgcccagcagattttctggcagcggctctggcaccgacttcaccctgacaatatccagcctccagcctgaggacttcgccacctactactgccagcagtacaacagctaccctctgaccttcggccagggcaccaaggtggaaatcaaaagaggcggaggcggatctggcggcggaggtagcggtggcggaggatctgaagtgcagctggttgaatcaggtggcggcctggttcaacctggcggatctctgagactgagctgtgccgccagcggctacacctttaccgagtacacaatccactgggtccgacaggcccctggcaaaggacttgagtgggtcgccaacatcaaccccaacaatggcggcaccacctacaaccagaagttcgaggacagattcaccatcagccgggacaacagcaagaacaccctgtacctccagatgaactccctgagagccgaggacaccgccgtgtactattgtgccagaggctggaacttcgactactggggccagggaacactggtcaccgttagctctacgcgtaccacgacgccagcgccgcgaccaccaacaccggcgcccaccatcgcgtcgcagcccctgtccctgcgcccagaggcgtgccggccagcggcggggggcgcagtgcacacgagggggctggacttcgcctgtgacatctacatctgggcgcccttggccgggacttgtggggtccttctcctgtcactggttatcaccctttactgcaaacggggcagaaagaaactcctgtatatattcaaacaaccatttatgagaccagtacaaactactcaagaggaagatggctgtagctgccgatttccagaagaagaagaaggaggatgtgaactgagagtgaagttcagcaggagcgcagacgcccccgcgtaccagcagggccagaaccagctctataacgagctgaatctaggacgaagagaggagtacgatgttttggacaagagacgtggccgggaccctgagatggggggaaagccgagaaggaagaaccctcaggaaggcctgtacaatgaactgcagaaagataagatggcggaggcctacagtgagattgggatgaaaggcgagcgccggaggggcaaggggcacgatggcctttaccagggtctcagtacagccaccaaggacacctacgacgcccttcacatgcaggccctgccccctcgctaa

SEQ ID NO: 8695 - DNA, 1488 bp, synthetic construct
  source 1..1488: mol_type = other DNA
atggccttaccagtgaccgccttgctcctgccgctggccttgctgctccacgccgccaggccggtgtggaagtacgccgacgccggaggcagcggagacatccagatgacacagagccctagcagcctgtctgccagcgtgggagacagagtgaccatcacatgcaaggccagccaggatgtgggcacagccgtggattggtatcagcagaagcctggcaaggcccctaagctgctgatctactgggccagcacaagacacacaggcgtgcccagcagattttctggcagcggctctggcaccgacttcaccctgacaatatccagcctccagcctgaggacttcgccacctactactgccagcagtacaacagctaccctctgaccttcggccagggcaccaaggtggaaatcaaaagaggcggaggcggatctggcggcggaggtagcggtggcggaggatctgaagtgcagctggttgaatcaggtggcggcctggttcaacctggcggatctctgagactgagctgtgccgccagcggctacacctttaccgagtacacaatccactgggtccgacaggcccctggcaaaggacttgagtgggtcgccaacatcaaccccaacaatggcggcaccacctacaaccagaagttcgaggacagattcaccatcagccgggacaacagcaagaacaccctgtacctccagatgaactccctgagagccgaggacaccgccgtgtactattgtgccagaggctggaacttcgactactggggccagggaacactggtcaccgttagctctacgcgtaccacgacgccagcgccgcgaccaccaacaccggcgcccaccatcgcgtcgcagcccctgtccctgcgcccagaggcgtgccggccagcggcggggggcgcagtgcacacgagggggctggacttcgcctgtgacatctacatctgggcgcccttggccgggacttgtggggtccttctcctgtcactggttatcaccctttactgcaaacggggcagaaagaaactcctgtatatattcaaacaaccatttatgagaccagtacaaactactcaagaggaagatggctgtagctgccgatttccagaagaagaagaaggaggatgtgaactgagagtgaagttcagcaggagcgcagacgcccccgcgtaccagcagggccagaaccagctctataacgagctgaatctaggacgaagagaggagtacgatgttttggacaagagacgtggccgggaccctgagatggggggaaagccgagaaggaagaaccctcaggaaggcctgtacaatgaactgcagaaagataagatggcggaggcctacagtgagattgggatgaaaggcgagcgccggaggggcaaggggcacgatggcctttaccagggtctcagtacagccaccaaggacacctacgacgcccttcacatgcaggccctgccccctcgctaa

SEQ ID NO: 8696 - DNA, 1506 bp, synthetic construct
  source 1..1506: mol_type = other DNA
atggccttaccagtgaccgccttgctcctgccgctggccttgctgctccacgccgccaggccggccaacagcttcatcttcaagtacgccgaccccgaccgcggaggcagcggagacatccagatgacacagagccctagcagcctgtctgccagcgtgggagacagagtgaccatcacatgcaaggccagccaggatgtgggcacagccgtggattggtatcagcagaagcctggcaaggcccctaagctgctgatctactgggccagcacaagacacacaggcgtgcccagcagattttctggcagcggctctggcaccgacttcaccctgacaatatccagcctccagcctgaggacttcgccacctactactgccagcagtacaacagctaccctctgaccttcggccagggcaccaaggtggaaatcaaaagaggcggaggcggatctggcggcggaggtagcggtggcggaggatctgaagtgcagctggttgaatcaggtggcggcctggttcaacctggcggatctctgagactgagctgtgccgccagcggctacacctttaccgagtacacaatccactgggtccgacaggcccctggcaaaggacttgagtgggtcgccaacatcaaccccaacaatggcggcaccacctacaaccagaagttcgaggacagattcaccatcagccgggacaacagcaagaacaccctgtacctccagatgaactccctgagagccgaggacaccgccgtgtactattgtgccagaggctggaacttcgactactggggccagggaacactggtcaccgttagctctacgcgtaccacgacgccagcgccgcgaccaccaacaccggcgcccaccatcgcgtcgcagcccctgtccctgcgcccagaggcgtgccggccagcggcggggggcgcagtgcacacgagggggctggacttcgcctgtgacatctacatctgggcgcccttggccgggacttgtggggtccttctcctgtcactggttatcaccctttactgcaaacggggcagaaagaaactcctgtatatattcaaacaaccatttatgagaccagtacaaactactcaagaggaagatggctgtagctgccgatttccagaagaagaagaaggaggatgtgaactgagagtgaagttcagcaggagcgcagacgcccccgcgtaccagcagggccagaaccagctctataacgagctgaatctaggacgaagagaggagtacgatgttttggacaagagacgtggccgggaccctgagatggggggaaagccgagaaggaagaaccctcaggaaggcctgtacaatgaactgcagaaagataagatggcggaggcctacagtgagattgggatgaaaggcgagcgccggaggggcaaggggcacgatggcctttaccagggtctcagtacagccaccaaggacacctacgacgcccttcacatgcaggccctgccccctcgctaa

SEQ ID NO: 8697 - DNA, 1503 bp, synthetic construct
  source 1..1503: mol_type = other DNA
atggccttaccagtgaccgccttgctcctgccgctggccttgctgctccacgccgccaggccgaacagcttcatcttcaagtacgccgaccccgaccgcggaggcagcggagacatccagatgacacagagccctagcagcctgtctgccagcgtgggagacagagtgaccatcacatgcaaggccagccaggatgtgggcacagccgtggattggtatcagcagaagcctggcaaggcccctaagctgctgatctactgggccagcacaagacacacaggcgtgcccagcagattttctggcagcggctctggcaccgacttcaccctgacaatatccagcctccagcctgaggacttcgccacctactactgccagcagtacaacagctaccctctgaccttcggccagggcaccaaggtggaaatcaaaagaggcggaggcggatctggcggcggaggtagcggtggcggaggatctgaagtgcagctggttgaatcaggtggcggcctggttcaacctggcggatctctgagactgagctgtgccgccagcggctacacctttaccgagtacacaatccactgggtccgacaggcccctggcaaaggacttgagtgggtcgccaacatcaaccccaacaatggcggcaccacctacaaccagaagttcgaggacagattcaccatcagccgggacaacagcaagaacaccctgtacctccagatgaactccctgagagccgaggacaccgccgtgtactattgtgccagaggctggaacttcgactactggggccagggaacactggtcaccgttagctctacgcgtaccacgacgccagcgccgcgaccaccaacaccggcgcccaccatcgcgtcgcagcccctgtccctgcgcccagaggcgtgccggccagcggcggggggcgcagtgcacacgagggggctggacttcgcctgtgacatctacatctgggcgcccttggccgggacttgtggggtccttctcctgtcactggttatcaccctttactgcaaacggggcagaaagaaactcctgtatatattcaaacaaccatttatgagaccagtacaaactactcaagaggaagatggctgtagctgccgatttccagaagaagaagaaggaggatgtgaactgagagtgaagttcagcaggagcgcagacgcccccgcgtaccagcagggccagaaccagctctataacgagctgaatctaggacgaagagaggagtacgatgttttggacaagagacgtggccgggaccctgagatggggggaaagccgagaaggaagaaccctcaggaaggcctgtacaatgaactgcagaaagataagatggcggaggcctacagtgagattgggatgaaaggcgagcgccggaggggcaaggggcacgatggcctttaccagggtctcagtacagccaccaaggacacctacgacgcccttcacatgcaggccctgccccctcgctaa

SEQ ID NO: 8698 - DNA, 1497 bp, synthetic construct
  source 1..1497: mol_type = other DNA
atggccttaccagtgaccgccttgctcctgccgctggccttgctgctccacgccgccaggccgaacagcttcatcttcaagtacgccgaccccggaggcagcggagacatccagatgacacagagccctagcagcctgtctgccagcgtgggagacagagtgaccatcacatgcaaggccagccaggatgtgggcacagccgtggattggtatcagcagaagcctggcaaggcccctaagctgctgatctactgggccagcacaagacacacaggcgtgcccagcagattttctggcagcggctctggcaccgacttcaccctgacaatatccagcctccagcctgaggacttcgccacctactactgccagcagtacaacagctaccctctgaccttcggccagggcaccaaggtggaaatcaaaagaggcggaggcggatctggcggcggaggtagcggtggcggaggatctgaagtgcagctggttgaatcaggtggcggcctggttcaacctggcggatctctgagactgagctgtgccgccagcggctacacctttaccgagtacacaatccactgggtccgacaggcccctggcaaaggacttgagtgggtcgccaacatcaaccccaacaatggcggcaccacctacaaccagaagttcgaggacagattcaccatcagccgggacaacagcaagaacaccctgtacctccagatgaactccctgagagccgaggacaccgccgtgtactattgtgccagaggctggaacttcgactactggggccagggaacactggtcaccgttagctctacgcgtaccacgacgccagcgccgcgaccaccaacaccggcgcccaccatcgcgtcgcagcccctgtccctgcgcccagaggcgtgccggccagcggcggggggcgcagtgcacacgagggggctggacttcgcctgtgacatctacatctgggcgcccttggccgggacttgtggggtccttctcctgtcactggttatcaccctttactgcaaacggggcagaaagaaactcctgtatatattcaaacaaccatttatgagaccagtacaaactactcaagaggaagatggctgtagctgccgatttccagaagaagaagaaggaggatgtgaactgagagtgaagttcagcaggagcgcagacgcccccgcgtaccagcagggccagaaccagctctataacgagctgaatctaggacgaagagaggagtacgatgttttggacaagagacgtggccgggaccctgagatggggggaaagccgagaaggaagaaccctcaggaaggcctgtacaatgaactgcagaaagataagatggcggaggcctacagtgagattgggatgaaaggcgagcgccggaggggcaaggggcacgatggcctttaccagggtctcagtacagccaccaaggacacctacgacgcccttcacatgcaggccctgccccctcgctaa

SEQ ID NO: 8699 - DNA, 1494 bp, synthetic construct
  source 1..1494: mol_type = other DNA
atggccttaccagtgaccgccttgctcctgccgctggccttgctgctccacgccgccaggccgaacagcttcatcttcaagtacgccgacggaggcagcggagacatccagatgacacagagccctagcagcctgtctgccagcgtgggagacagagtgaccatcacatgcaaggccagccaggatgtgggcacagccgtggattggtatcagcagaagcctggcaaggcccctaagctgctgatctactgggccagcacaagacacacaggcgtgcccagcagattttctggcagcggctctggcaccgacttcaccctgacaatatccagcctccagcctgaggacttcgccacctactactgccagcagtacaacagctaccctctgaccttcggccagggcaccaaggtggaaatcaaaagaggcggaggcggatctggcggcggaggtagcggtggcggaggatctgaagtgcagctggttgaatcaggtggcggcctggttcaacctggcggatctctgagactgagctgtgccgccagcggctacacctttaccgagtacacaatccactgggtccgacaggcccctggcaaaggacttgagtgggtcgccaacatcaaccccaacaatggcggcaccacctacaaccagaagttcgaggacagattcaccatcagccgggacaacagcaagaacaccctgtacctccagatgaactccctgagagccgaggacaccgccgtgtactattgtgccagaggctggaacttcgactactggggccagggaacactggtcaccgttagctctacgcgtaccacgacgccagcgccgcgaccaccaacaccggcgcccaccatcgcgtcgcagcccctgtccctgcgcccagaggcgtgccggccagcggcggggggcgcagtgcacacgagggggctggacttcgcctgtgacatctacatctgggcgcccttggccgggacttgtggggtccttctcctgtcactggttatcaccctttactgcaaacggggcagaaagaaactcctgtatatattcaaacaaccatttatgagaccagtacaaactactcaagaggaagatggctgtagctgccgatttccagaagaagaagaaggaggatgtgaactgagagtgaagttcagcaggagcgcagacgcccccgcgtaccagcagggccagaaccagctctataacgagctgaatctaggacgaagagaggagtacgatgttttggacaagagacgtggccgggaccctgagatggggggaaagccgagaaggaagaaccctcaggaaggcctgtacaatgaactgcagaaagataagatggcggaggcctacagtgagattgggatgaaaggcgagcgccggaggggcaaggggcacgatggcctttaccagggtctcagtacagccaccaaggacacctacgacgcccttcacatgcaggccctgccccctcgctaa

SEQ ID NO: 8700 - DNA, 1488 bp, synthetic construct
  source 1..1488: mol_type = other DNA
atggccttaccagtgaccgccttgctcctgccgctggccttgctgctccacgccgccaggccgcccatctacaagtaccccgacggaggcagcggagacatccagatgacacagagccctagcagcctgtctgccagcgtgggagacagagtgaccatcacatgcaaggccagccaggatgtgggcacagccgtggattggtatcagcagaagcctggcaaggcccctaagctgctgatctactgggccagcacaagacacacaggcgtgcccagcagattttctggcagcggctctggcaccgacttcaccctgacaatatccagcctccagcctgaggacttcgccacctactactgccagcagtacaacagctaccctctgaccttcggccagggcaccaaggtggaaatcaaaagaggcggaggcggatctggcggcggaggtagcggtggcggaggatctgaagtgcagctggttgaatcaggtggcggcctggttcaacctggcggatctctgagactgagctgtgccgccagcggctacacctttaccgagtacacaatccactgggtccgacaggcccctggcaaaggacttgagtgggtcgccaacatcaaccccaacaatggcggcaccacctacaaccagaagttcgaggacagattcaccatcagccgggacaacagcaagaacaccctgtacctccagatgaactccctgagagccgaggacaccgccgtgtactattgtgccagaggctggaacttcgactactggggccagggaacactggtcaccgttagctctacgcgtaccacgacgccagcgccgcgaccaccaacaccggcgcccaccatcgcgtcgcagcccctgtccctgcgcccagaggcgtgccggccagcggcggggggcgcagtgcacacgagggggctggacttcgcctgtgacatctacatctgggcgcccttggccgggacttgtggggtccttctcctgtcactggttatcaccctttactgcaaacggggcagaaagaaactcctgtatatattcaaacaaccatttatgagaccagtacaaactactcaagaggaagatggctgtagctgccgatttccagaagaagaagaaggaggatgtgaactgagagtgaagttcagcaggagcgcagacgcccccgcgtaccagcagggccagaaccagctctataacgagctgaatctaggacgaagagaggagtacgatgttttggacaagagacgtggccgggaccctgagatggggggaaagccgagaaggaagaaccctcaggaaggcctgtacaatgaactgcagaaagataagatggcggaggcctacagtgagattgggatgaaaggcgagcgccggaggggcaaggggcacgatggcctttaccagggtctcagtacagccaccaaggacacctacgacgcccttcacatgcaggccctgccccctcgctaa

SEQ ID NO: 8701 - DNA, 1530 bp, synthetic construct
  source 1..1530: mol_type = other DNA
atggccttaccagtgaccgccttgctcctgccgctggccttgctgctccacgccgccaggccgcgcggcaacctgaccatgagcttccacctggagatcaccgcccgccccgtgctgtggcactggggaggcagcggagacatccagatgacacagagccctagcagcctgtctgccagcgtgggagacagagtgaccatcacatgcaaggccagccaggatgtgggcacagccgtggattggtatcagcagaagcctggcaaggcccctaagctgctgatctactgggccagcacaagacacacaggcgtgcccagcagattttctggcagcggctctggcaccgacttcaccctgacaatatccagcctccagcctgaggacttcgccacctactactgccagcagtacaacagctaccctctgaccttcggccagggcaccaaggtggaaatcaaaagaggcggaggcggatctggcggcggaggtagcggtggcggaggatctgaagtgcagctggttgaatcaggtggcggcctggttcaacctggcggatctctgagactgagctgtgccgccagcggctacacctttaccgagtacacaatccactgggtccgacaggcccctggcaaaggacttgagtgggtcgccaacatcaaccccaacaatggcggcaccacctacaaccagaagttcgaggacagattcaccatcagccgggacaacagcaagaacaccctgtacctccagatgaactccctgagagccgaggacaccgccgtgtactattgtgccagaggctggaacttcgactactggggccagggaacactggtcaccgttagctctacgcgtaccacgacgccagcgccgcgaccaccaacaccggcgcccaccatcgcgtcgcagcccctgtccctgcgcccagaggcgtgccggccagcggcggggggcgcagtgcacacgagggggctggacttcgcctgtgacatctacatctgggcgcccttggccgggacttgtggggtccttctcctgtcactggttatcaccctttactgcaaacggggcagaaagaaactcctgtatatattcaaacaaccatttatgagaccagtacaaactactcaagaggaagatggctgtagctgccgatttccagaagaagaagaaggaggatgtgaactgagagtgaagttcagcaggagcgcagacgcccccgcgtaccagcagggccagaaccagctctataacgagctgaatctaggacgaagagaggagtacgatgttttggacaagagacgtggccgggaccctgagatggggggaaagccgagaaggaagaaccctcaggaaggcctgtacaatgaactgcagaaagataagatggcggaggcctacagtgagattgggatgaaaggcgagcgccggaggggcaaggggcacgatggcctttaccagggtctcagtacagccaccaaggacacctacgacgcccttcacatgcaggccctgccccctcgctaa

SEQ ID NO: 8702 - DNA, 1515 bp, synthetic construct
  source 1..1515: mol_type = other DNA
atggccttaccagtgaccgccttgctcctgccgctggccttgctgctccacgccgccaggccgcgcggcaacctgaccatgagcttccacctggagatcaccgcccgccccggaggcagcggagacatccagatgacacagagccctagcagcctgtctgccagcgtgggagacagagtgaccatcacatgcaaggccagccaggatgtgggcacagccgtggattggtatcagcagaagcctggcaaggcccctaagctgctgatctactgggccagcacaagacacacaggcgtgcccagcagattttctggcagcggctctggcaccgacttcaccctgacaatatccagcctccagcctgaggacttcgccacctactactgccagcagtacaacagctaccctctgaccttcggccagggcaccaaggtggaaatcaaaagaggcggaggcggatctggcggcggaggtagcggtggcggaggatctgaagtgcagctggttgaatcaggtggcggcctggttcaacctggcggatctctgagactgagctgtgccgccagcggctacacctttaccgagtacacaatccactgggtccgacaggcccctggcaaaggacttgagtgggtcgccaacatcaaccccaacaatggcggcaccacctacaaccagaagttcgaggacagattcaccatcagccgggacaacagcaagaacaccctgtacctccagatgaactccctgagagccgaggacaccgccgtgtactattgtgccagaggctggaacttcgactactggggccagggaacactggtcaccgttagctctacgcgtaccacgacgccagcgccgcgaccaccaacaccggcgcccaccatcgcgtcgcagcccctgtccctgcgcccagaggcgtgccggccagcggcggggggcgcagtgcacacgagggggctggacttcgcctgtgacatctacatctgggcgcccttggccgggacttgtggggtccttctcctgtcactggttatcaccctttactgcaaacggggcagaaagaaactcctgtatatattcaaacaaccatttatgagaccagtacaaactactcaagaggaagatggctgtagctgccgatttccagaagaagaagaaggaggatgtgaactgagagtgaagttcagcaggagcgcagacgcccccgcgtaccagcagggccagaaccagctctataacgagctgaatctaggacgaagagaggagtacgatgttttggacaagagacgtggccgggaccctgagatggggggaaagccgagaaggaagaaccctcaggaaggcctgtacaatgaactgcagaaagataagatggcggaggcctacagtgagattgggatgaaaggcgagcgccggaggggcaaggggcacgatggcctttaccagggtctcagtacagccaccaaggacacctacgacgcccttcacatgcaggccctgccccctcgctaa

SEQ ID NO: 8703 - DNA, 1503 bp, synthetic construct
  source 1..1503: mol_type = other DNA
atggccttaccagtgaccgccttgctcctgccgctggccttgctgctccacgccgccaggccgaccatgagcttccacctggagatcaccgcccgccccggaggcagcggagacatccagatgacacagagccctagcagcctgtctgccagcgtgggagacagagtgaccatcacatgcaaggccagccaggatgtgggcacagccgtggattggtatcagcagaagcctggcaaggcccctaagctgctgatctactgggccagcacaagacacacaggcgtgcccagcagattttctggcagcggctctggcaccgacttcaccctgacaatatccagcctccagcctgaggacttcgccacctactactgccagcagtacaacagctaccctctgaccttcggccagggcaccaaggtggaaatcaaaagaggcggaggcggatctggcggcggaggtagcggtggcggaggatctgaagtgcagctggttgaatcaggtggcggcctggttcaacctggcggatctctgagactgagctgtgccgccagcggctacacctttaccgagtacacaatccactgggtccgacaggcccctggcaaaggacttgagtgggtcgccaacatcaaccccaacaatggcggcaccacctacaaccagaagttcgaggacagattcaccatcagccgggacaacagcaagaacaccctgtacctccagatgaactccctgagagccgaggacaccgccgtgtactattgtgccagaggctggaacttcgactactggggccagggaacactggtcaccgttagctctacgcgtaccacgacgccagcgccgcgaccaccaacaccggcgcccaccatcgcgtcgcagcccctgtccctgcgcccagaggcgtgccggccagcggcggggggcgcagtgcacacgagggggctggacttcgcctgtgacatctacatctgggcgcccttggccgggacttgtggggtccttctcctgtcactggttatcaccctttactgcaaacggggcagaaagaaactcctgtatatattcaaacaaccatttatgagaccagtacaaactactcaagaggaagatggctgtagctgccgatttccagaagaagaagaaggaggatgtgaactgagagtgaagttcagcaggagcgcagacgcccccgcgtaccagcagggccagaaccagctctataacgagctgaatctaggacgaagagaggagtacgatgttttggacaagagacgtggccgggaccctgagatggggggaaagccgagaaggaagaaccctcaggaaggcctgtacaatgaactgcagaaagataagatggcggaggcctacagtgagattgggatgaaaggcgagcgccggaggggcaaggggcacgatggcctttaccagggtctcagtacagccaccaaggacacctacgacgcccttcacatgcaggccctgccccctcgctaa

SEQ ID NO: 8704 - DNA, 2178 bp, synthetic construct
  source 1..2178: mol_type = other DNA
atggccttaccagtgaccgccttgctcctgccgctggccttgctgctccacgccgccaggccgcaggttcagctccagcagtctggacctggcctggtcaagcctagccagacactgtctctgacctgtgccatcagcggcgatagcgtgtcctctaatagagccgcctggaactggatcagacagagccctagcagaggactccagtggctgggcagaacctactaccgcagcaagtggtacaacgactacgccgtgtctctgcggagccggatcaccatcaatcccgtgaccagcaagaaccaggtggccctgcacatgaacagcgtgacccctgaagataccgccgtgtactactgtgccagagccggaattgtggtggtgcccggacctgagacattctactactacgaccacggcctggacgtgtggggccagggaacaatagtgactgtctcttctggaggcggtggatctggcggcggaggtagtggtggtggcggatctgacatccagatgacacagagcccctctagcctgtctgccagcgtgggagacagagtgaccatcacctgtagagccagccagagcatcagaagctacctgaactggtatcagcaaaagcccggcaaggcccctgagctgctgattcatgctgcaagcagcctccagagcggcgtgccaagcagattttctggcagcggcagcggaaccgacttcaccctgacaatatctagcctccagcctgaggacttcgccagctactactgccagcagagctacagcgcccctcctatcacctttggacagggcaccagactggaaatcaagacgcgtaccacgacgccagcgccgcgaccaccaacaccggcgcccaccatcgcgtcgcagcccctgtccctgcgcccagaggcgtgccggccagcggcggggggcgcagtgcacacgagggggctggacttcgcctgtgacatctacatctgggcgcccttggccgggacttgtggggtccttctcctgtcactggttatcaccctttactgcaaacggggcagaaagaaactcctgtatatattcaaacaaccatttatgagaccagtacaaactactcaagaggaagatggctgtagctgccgatttccagaagaagaagaaggaggatgtgaactgagagtgaagttcagcaggagcgcagacgcccccgcgtaccagcagggccagaaccagctctataacgagctgaatctaggacgaagagaggagtacgatgttttggacaagagacgtggccgggaccctgagatggggggaaagccgagaaggaagaaccctcaggaaggcctgtacaatgaactgcagaaagataagatggcggaggcctacagtgagattgggatgaaaggcgagcgccggaggggcaaggggcacgatggcctttaccagggtctcagtacagccaccaaggacacctacgacgcccttcacatgcaggccctgccccctcgctctagtggctccggcgagggcagaggaagtctactaacctgcggagatgtggaagaaaatcctggcccacatatgaccgagtacaagcccacggtgcgcctcgccacccgcgacgacgtccccagggccgtacgcaccctcgccgccgcgttcgccgactaccccgccacgcgccacaccgtcgatccggaccgccacatcgagcgggtcaccgagctgcaagaactcttcctcacgcgcgtcgggctcgacatcggcaaggtgtgggtcgcggacgacggcgccgcggtggcggtctggaccacgccggagagcgtcgaagcgggggcggtgttcgccgagatcggcccgcgcatggccgagttgagcggttcccggctggccgcgcagcaacagatggaaggcctcctggcgccgcaccggcccaaggagcccgcgtggttcctggccaccgtcggcgtctcgcccgaccaccagggcaagggtctgggcagcgccgtcgtgctccccggagtggaggcggccgagcgcgccggggtgcccgccttcctggagacctccgcgccccgcaacctccccttctacgagcggctcggcttcaccgtcaccgccgacgtcgaggtgcccgaaggaccgcgcacctggtgcatgacccgcaagcccggtgcctga

SEQ ID NO: 8705 - DNA, 1518 bp, synthetic construct
  source 1..1518: mol_type = other DNA
atggccttaccagtgaccgccttgctcctgccgctggccttgctgctccacgccgccaggccggaggtgcagctggttgaatctggcggaggactggttcagcctggcggatctctgagactgagctgtgccgtgtctggctacagcatcaccagcgactacgcctggaactgggttcgacaggcccctggcaaaggactggaatgggtcggatatatcagcaacagcggcagcaccagctacaaccccagcctgaagtcccggttcaccatcagcagagacaccagcaagaacaccctgtacctccagatgaacagcctgagagccgaggacaccgccgtgtactattgcgccagagagcggaactacgactacgacgattactactacgctatggactactggggccagggcaccctggttacagtgtcaagtgcttctggcggaggcggaagtggaggcggaggatctggcggcggaggctctgacattcagatgacacagagccctagcagcctgagcgcctctgtgggagacagagtgaccatcacatgcaagagcagccagagcctgctgtacagaagcaaccagaagaactacctggcctggtatcagcagaagcccggcaaggctcctaagctgctgatctactgggccagcaccagagaaagcggcgtgccaagcagattttccggcagcggctctggaaccgacttcaccctgacaatatccagcctccagcctgaggacttcgccacctactactgccagcagtattacaactaccccagaaccttcggacagggcaccaaggtggaaatcaagagaacagtggccgccacgcgtaccacgacgccagcgccgcgaccaccaacaccggcgcccaccatcgcgtcgcagcccctgtccctgcgcccagaggcgtgccggccagcggcggggggcgcagtgcacacgagggggctggacttcgcctgtgacatctacatctgggcgcccttggccgggacttgtggggtccttctcctgtcactggttatcaccctttactgcaaacggggcagaaagaaactcctgtatatattcaaacaaccatttatgagaccagtacaaactactcaagaggaagatggctgtagctgccgatttccagaagaagaagaaggaggatgtgaactgagagtgaagttcagcaggagcgcagacgcccccgcgtaccagcagggccagaaccagctctataacgagctgaatctaggacgaagagaggagtacgatgttttggacaagagacgtggccgggaccctgagatggggggaaagccgagaaggaagaaccctcaggaaggcctgtacaatgaactgcagaaagataagatggcggaggcctacagtgagattgggatgaaaggcgagcgccggaggggcaaggggcacgatggcctttaccagggtctcagtacagccaccaaggacacctacgacgcccttcacatgcaggccctgccccctcgctga

SEQ ID NO: 8706 - DNA, 1521 bp, synthetic construct
  source 1..1521: mol_type = other DNA
atggccttaccagtgaccgccttgctcctgccgctggccttgctgctccacgccgccaggccggaggtgcagctggttgaatctggcggaggactggttcagcctggcggatctctgagactgagctgtgccgtgtctggctacagcatcaccagcgactacgcctggaactgggttcgacaggcccctggcaaaggactggaatgggtcggatatatcagcaacagcggcagcaccagctacaaccccagcctgaagtcccggttcaccatcagcagagacaccagcaagaacaccctgtacctccagatgaacagcctgagagccgaggacaccgccgtgtactattgcgccagagagcggaactacgactacgacgattactactacgctatggactactggggccagggcaccctggttacagtgtcaagtgcttctggcggaggcggaagtggaggcggaggatctggcggcggaggctctgacattcagatgacacagagccctagcagcctgagcgcctctgtgggagacagagtgaccatcacatgcaagagcagccagagcctgctgtacagaagcaaccagaagaactacctggcctggtatcagcagaagcccggcaaggctcctaagctgctgatctactgggccagcaccagagaaagcggcgtgccaagcagattttccggcagcggctctggaaccgacttcaccctgacaatatccagcctccagcctgaggacttcgccacctactactgccagcagtattacaactaccccagaaccttcggacagggcaccaaggtggaaatcaagagaacagtggccgccacgcgtgctagaagcgaagatcggtatcggaaccccaaggcgaagcccaccatcgcgtcgcagcccctgtccctgcgcccagaggcgtgccggccagcggcggggggcgcagtgcacacgagggggctggacttcgcctgtgacatctacatctgggcgcccttggccgggacttgtggggtccttctcctgtcactggttatcaccctttactgcaaacggggcagaaagaaactcctgtatatattcaaacaaccatttatgagaccagtacaaactactcaagaggaagatggctgtagctgccgatttccagaagaagaagaaggaggatgtgaactgagagtgaagttcagcaggagcgcagacgcccccgcgtaccagcagggccagaaccagctctataacgagctgaatctaggacgaagagaggagtacgatgttttggacaagagacgtggccgggaccctgagatggggggaaagccgagaaggaagaaccctcaggaaggcctgtacaatgaactgcagaaagataagatggcggaggcctacagtgagattgggatgaaaggcgagcgccggaggggcaaggggcacgatggcctttaccagggtctcagtacagccaccaaggacacctacgacgcccttcacatgcaggccctgccccctcgctaa

SEQ ID NO: 8707 - DNA, 1506 bp, synthetic construct
  source 1..1506: mol_type = other DNA
atggccttaccagtgaccgccttgctcctgccgctggccttgctgctccacgccgccaggccggacatcgtgatgacacagagccctgatagcctggccgtgtctctgggagagagagccaccatcaactgcaagagcagccagagcctgctgtacagaagcaaccagaagaactacctggcctggtatcagcagaagcccggccagcctcctaagctgctgatctactgggccagcaccagagaaagcggcgtgcccgatagattttctggctctggcagcggcaccgacttcaccctgacaatttctagcctgcaagccgaggacgtggccgtgtactactgccagcagtattacaactaccccagaaccttcggccagggcaccaaggtggaaatcaagagaacagttggcggaggcggaagtggaggcggaggatctggcggcggaggctctgaagttcagctgcttgaatcaggcggcggactggttcaacctggcggatctctgagactgagctgtgccgccagcggctacagcatcacaagcgactatgcctggaactgggtccgacaggcccctggcaaaggactggaatgggtgtcctacatcagcaacagcggcagcaccagctacaaccccagcctgaagtcccggttcaccatcagcagagacaacagcaagaacaccctgtacctccagatgaacagcctgagagctgaggacaccgccgtgtattattgcgccaaagagcggaactacgactacgacgattactactacgctatggactactggggccagggaaccctggtcacagtctcttctacgcgtaccacgacgccagcgccgcgaccaccaacaccggcgcccaccatcgcgtcgcagcccctgtccctgcgcccagaggcgtgccggccagcggcggggggcgcagtgcacacgagggggctggacttcgcctgtgacatctacatctgggcgcccttggccgggacttgtggggtccttctcctgtcactggttatcaccctttactgcaaacggggcagaaagaaactcctgtatatattcaaacaaccatttatgagaccagtacaaactactcaagaggaagatggctgtagctgccgatttccagaagaagaagaaggaggatgtgaactgagagtgaagttcagcaggagcgcagacgcccccgcgtaccagcagggccagaaccagctctataacgagctgaatctaggacgaagagaggagtacgatgttttggacaagagacgtggccgggaccctgagatggggggaaagccgagaaggaagaaccctcaggaaggcctgtacaatgaactgcagaaagataagatggcggaggcctacagtgagattgggatgaaaggcgagcgccggaggggcaaggggcacgatggcctttaccagggtctcagtacagccaccaaggacacctacgacgcccttcacatgcaggccctgccccctcgctaa

SEQ ID NO: 8708 - DNA, 1509 bp, synthetic construct
  source 1..1509: mol_type = other DNA
atggccttaccagtgaccgccttgctcctgccgctggccttgctgctccacgccgccaggccggacatcgtgatgacacagagccctgatagcctggccgtgtctctgggagagagagccaccatcaactgcaagagcagccagagcctgctgtacagaagcaaccagaagaactacctggcctggtatcagcagaagcccggccagcctcctaagctgctgatctactgggccagcaccagagaaagcggcgtgcccgatagattttctggctctggcagcggcaccgacttcaccctgacaatttctagcctgcaagccgaggacgtggccgtgtactactgccagcagtattacaactaccccagaaccttcggccagggcaccaaggtggaaatcaagagaacagttggcggaggcggaagtggaggcggaggatctggcggcggaggctctgaagttcagctgcttgaatcaggcggcggactggttcaacctggcggatctctgagactgagctgtgccgccagcggctacagcatcacaagcgactatgcctggaactgggtccgacaggcccctggcaaaggactggaatgggtgtcctacatcagcaacagcggcagcaccagctacaaccccagcctgaagtcccggttcaccatcagcagagacaacagcaagaacaccctgtacctccagatgaacagcctgagagctgaggacaccgccgtgtattattgcgccaaagagcggaactacgactacgacgattactactacgctatggactactggggccagggaaccctggtcacagtctcttctacgcgtgctagaagcgaagatcggtatcggaaccccaaggcgaagcccaccatcgcgtcgcagcccctgtccctgcgcccagaggcgtgccggccagcggcggggggcgcagtgcacacgagggggctggacttcgcctgtgacatctacatctgggcgcccttggccgggacttgtggggtccttctcctgtcactggttatcaccctttactgcaaacggggcagaaagaaactcctgtatatattcaaacaaccatttatgagaccagtacaaactactcaagaggaagatggctgtagctgccgatttccagaagaagaagaaggaggatgtgaactgagagtgaagttcagcaggagcgcagacgcccccgcgtaccagcagggccagaaccagctctataacgagctgaatctaggacgaagagaggagtacgatgttttggacaagagacgtggccgggaccctgagatggggggaaagccgagaaggaagaaccctcaggaaggcctgtacaatgaactgcagaaagataagatggcggaggcctacagtgagattgggatgaaaggcgagcgccggaggggcaaggggcacgatggcctttaccagggtctcagtacagccaccaaggacacctacgacgcccttcacatgcaggccctgccccctcgctaa

SEQ ID NO: 8709 - DNA, 1518 bp, synthetic construct; identical to SEQ ID NO: 8705
  source 1..1518: mol_type = other DNA

SEQ ID NO: 8710 - DNA, 2631 bp, synthetic construct
  source 1..2631: mol_type = other DNA
atggccttaccagtgaccgccttgctcctgccgctggccttgctgctccacgccgccaggccggacatccagatgacacagactacatcctccctgtctgcctctctgggagacagagtcaccatcagttgcagggcaagtcaggacattagtaagtacctgaactggtatcagcagaaaccagatggaactgttaaactcctgatctaccatacatcaagattacactcaggagtcccatcaaggttcagtggcagtgggtctggaacagattattctctcaccattagcaacctggagcaagaagatattgccacttacttttgccaacagggtaatacgcttccgtacacgttcggaggggggaccaagctggagatcacactcgaggataaacaacttgatgcagatgtttcccccaagcccactatttttcttccttcaattgctgaaacaaaactccagaaggctggaacatacctttgtcttcttgagaaatttttcccagatattattaagatacattggcaagaaaagaagagcaacacgattctgggatcccaggaggggaacaccatgaagactaacgacacatacatgaaatttagctggttaacggtgccagaagagtcactggacaaagaacacagatgtatcgtcagacatgagaataataaaaacggaattgatcaagaaattatctttcctccaataaagacagatgtcaccacagtggatcccaaatacaattattcaaaggatgcaaatgatgtcatcacaatggatcccaaagacaattggtcaaaagatgcaaatgatacactactgctgcagctcacaaacacctctgcatattacatgtacctcctcctgctcctcaagagtgtggtctattttgccatcatcacctgctgtctgcttggaagaacggctttctgctgcaatggagagaaatcaagggccaagcgatctggatctggagcaacaaacttctcactactcaaacaagcaggtgacgtggaggagaatcccgggcctactagtatggactggatttggcgcatccttttccttgtcggcgctgctaccggcgcgcattccttcgaagtgaaactgcaggagtcaggacctggcctggtggcgccctcacagagcctgtccgtcacatgcactgtctcaggggtctcattacccgactatggtgtaagctggattcgccagcctccacgaaagggtctggagtggctgggagtaatatggggtagtgaaaccacatactataattcagctctcaaatccagactgaccatcatcaaggacaactccaagagccaagttttcttaaaaatgaacagtctgcaaactgatgacacagccatttactactgtgccaaacattattactacggtggtagctatgctatggactactggggccaaggaacctcagtcaccgtctcctcaacgcgtagtcagcctcataccaaaccatccgtttttgtcatgaaaaatggaacaaatgtcgcttgtctggtgaaggaattctaccccaaggatataagaataaatctcgtgtcatccaagaagataacagagtttgatcctgctattgtcatctctcccagtgggaagtacaatgctgtcaagcttggtaaatatgaagattcaaattcagtgacatgttcagttcaacacgacaataaaactgtgcactccactgactttgaagtgaagacagattctacagatcacgtaaaaccaaaggaaactgaaaacacaaagcaaccttcaaagagctgccataaacccaaagccatagttcataccgagaaggtgaacatgatgtccctcacagtgcttgggctacgaatgctgtttgcaaagactgttgccgtcaattttctcttgactgccaagttatttttcttgcgcgccaagagaagcggatctggcgtgaagcagaccctgaatttcgacctgctgaagctggctggcgacgtggaatccaacccaggcccttctagaggccatatgaccgagtacaagcccacggtgcgcctcgccacccgcgacgacgtccccagggccgtacgcaccctcgccgccgcgttcgccgactaccccgccacgcgccacaccgtcgatccggaccgccacatcgagcgggtcaccgagctgcaagaactcttcctcacgcgcgtcgggctcgacatcggcaaggtgtgggtcgcggacgacggcgccgcggtggcggtctggaccacgccggagagcgtcgaagcgggggcggtgttcgccgagatcggcccgcgcatggccgagttgagcggttcccggctggccgcgcagcaacagatggaaggcctcctggcgccgcaccggcccaaggagcccgcgtggttcctggccaccgtcggcgtctcgcccgaccaccagggcaagggtctgggcagcgccgtcgtgctccccggagtggaggcggccgagcgcgccggggtgcccgccttcctggagacctccgcgccccgcaacctccccttctacgagcggctcggcttcaccgtcaccgccgacgtcgaggtgcccgaaggaccgcgcacctggtgcatgacccgcaagcccggtgcctga

SEQ ID NO: 8711 - DNA, 2619 bp, synthetic construct
  source 1..2619: mol_type = other DNA
atggccttaccagtgaccgccttgctcctgccgctggccttgctgctccacgccgccaggccggacatccagatgacacagactacatcctccctgtctgcctctctgggagacagagtcaccatcagttgcagggcaagtcaggacattagtaagtacctgaactggtatcagcagaaaccagatggaactgttaaactcctgatctaccatacatcaagattacactcaggagtcccatcaaggttcagtggcagtgggtctggaacagattattctctcaccattagcaacctggagcaagaagatattgccacttacttttgccaacagggtaatacgcttccgtacacgttcggaggggggaccaagctggagatcacactcgaggttgcggcgctcgaaagggacaagcagctggacgccgacgtgtcccccaagcctaccatcttcctgccctctatcgccgagacaaagctccagaaggccggcacctacctgtgcctgctggaaaagttcttcccagatgtgattaagatccactggcaggaaaagaagtccaacaccatcctgggcagccaggaaggcaacaccatgaagaccaacgacacctacatgaagttcagctggctgaccgtgcccgagaagtccctggacaaagaacacagatgcatcgtgcggcacgaaaacaacaagaacggcgtggaccaggaaatcatcttcccacccatcaagaccgatgtgattacaatggaccccaaggacaactgctccaaggacgccaacgataccctgctgctccagctgaccaacaccagcgcctactacatgtacttgttgctgctgctgaagtccgtggtgtacttcgccatcatcacatgctgcctgctgcggagaaccgccttctgctgcaacggcgagaagtctagggccaagcgatctggatctggagcaacaaacttctcactactcaaacaagcaggtgacgtggaggagaatcccgggcctactagtatggactggatttggcgcatccttttccttgtcggcgctgctaccggcgcgcattccttcgaagtgaaactgcaggagtcaggacctggcctggtggcgccctcacagagcctgtccgtcacatgcactgtctcaggggtctcattacccgactatggtgtaagctggattcgccagcctccacgaaagggtctggagtggctgggagtaatatggggtagtgaaaccacatactataattcagctctcaaatccagactgaccatcatcaaggacaactccaagagccaagttttcttaaaaatgaacagtctgcaaactgatgacacagccatttactactgtgccaaacattattactacggtggtagctatgctatggactactggggccaaggaacctcagtcaccgtctcctcaacgcgtgtggctgcgctcaaggagagccagcctcacaccaagcccagcgtgttcgtgatgaagaacggcaccaacgtggcctgcctcgtgaaagagttctaccccaaggacatcaggatcaacctggtgtccagcaagaagatcaccgagttcgaccccgccatcgtgatctcccccagcggcaagtacaacgccgtgaagctggggaagtacgaggacagcaacagcgtgacctgctccgtgcagcacgacaacaagaccgtgcacagcaccgactttgaagtgaaaaccgactccaccgaccacgtgaagcccaaagagacagagaacaccaagcagcccagcaagagctgccacaagcccaaggccatcgtgcacaccgagaaagtgaacatgatgagcctgaccgtgctgggcctgcggatgctgttcgccaaaaccgtggccgtgaacttcctgctgaccgccaagctgttcttcctccgcgccaagagaagcggatctggcgtgaagcagaccctgaatttcgacctgctgaagctggctggcgacgtggaatccaacccaggcccttctagaggccatatgaccgagtacaagcccacggtgcgcctcgccacccgcgacgacgtccccagggccgtacgcaccctcgccgccgcgttcgccgactaccccgccacgcgccacaccgtcgatccggaccgccacatcgagcgggtcaccgagctgcaagaactcttcctcacgcgcgtcgggctcgacatcggcaaggtgtgggtcgcggacgacggcgccgcggtggcggtctggaccacgccggagagcgtcgaagcgggggcggtgttcgccgagatcggcccgcgcatggccgagttgagcggttcccggctggccgcgcagcaacagatggaaggcctcctggcgccgcaccggcccaaggagcccgcgtggttcctggccaccgtcggcgtctcgcccgaccaccagggcaagggtctgggcagcgccgtcgtgctccccggagtggaggcggccgagcgcgccggggtgcccgccttcctggagacctccgcgccccgcaacctccccttctacgagcggctcggcttcaccgtcaccgccgacgtcgaggtgcccgaaggaccgcgcacctggtgcatgacccgcaagcccggtgcctga

SEQ ID NO: 8712 - DNA, 2625 bp, synthetic construct
  source 1..2625: mol_type = other DNA
atggccttaccagtgaccgccttgctcctgccgctggccttgctgctccacgccgccaggccggacatccagatgacacagactacatcctccctgtctgcctctctgggagacagagtcaccatcagttgcagggcaagtcaggacattagtaagtacctgaactggtatcagcagaaaccagatggaactgttaaactcctgatctaccatacatcaagattacactcaggagtcccatcaaggttcagtggcagtgggtctggaacagattattctctcaccattagcaacctggagcaagaagatattgccacttacttttgccaacagggtaatacgcttccgtacacgttcggaggggggaccaagctggagatcacactcgagcctggtggcggaggatctcctgacaagcagctggacgccgacgtgtcccccaagcctaccatcttcctgccctctatcgccgagacaaagctccagaaggccggcacctacctgtgcctgctggaaaagttcttcccagatgtgattaagatccactggcaggaaaagaagtccaacaccatcctgggcagccaggaaggcaacaccatgaagaccaacgacacctacatgaagttcagctggctgaccgtgcccgagaagtccctggacaaagaacacagatgcatcgtgcggcacgaaaacaacaagaacggcgtggaccaggaaatcatcttcccacccatcaagaccgatgtgattacaatggaccccaaggacaactgctccaaggacgccaacgataccctgctgctccagctgaccaacaccagcgcctactacatgtacttgttgctgctgctgaagtccgtggtgtacttcgccatcatcacatgctgcctgctgcggagaaccgccttctgctgcaacggcgagaagtctagggccaagcgatctggatctggagcaacaaacttctcactactcaaacaagcaggtgacgtggaggagaatcccgggcctactagtatggactggatttggcgcatccttttccttgtcggcgctgctaccggcgcgcattccttcgaagtgaaactgcaggagtcaggacctggcctggtggcgccctcacagagcctgtccgtcacatgcactgtctcaggggtctcattacccgactatggtgtaagctggattcgccagcctccacgaaagggtctggagtggctgggagtaatatggggtagtgaaaccacatactataattcagctctcaaatccagactgaccatcatcaaggacaactccaagagccaagttttcttaaaaatgaacagtctgcaaactgatgacacagccatttactactgtgccaaacattattactacggtggtagctatgctatggactactggggccaaggaacctcagtcaccgtctcctcaacgcgtcctggcggaggcgggtctcctagccagcctcacaccaagcccagcgtgttcgtgatgaagaacggcaccaacgtggcctgcctcgtgaaagagttctaccccaaggacatcaggatcaacctggtgtccagcaagaagatcaccgagttcgaccccgccatcgtgatctcccccagcggcaagtacaacgccgtgaagctggggaagtacgaggacagcaacagcgtgacctgctccgtgcagcacgacaacaagaccgtgcacagcaccgactttgaagtgaaaaccgactccaccgaccacgtgaagcccaaagagacagagaacaccaagcagcccagcaagagctgccacaagcccaaggccatcgtgcacaccgagaaagtgaacatgatgagcctgaccgtgctgggcctgcggatgctgttcgccaaaaccgtggccgtgaacttcctgctgaccgccaagctgttcttcctccgcgccaagagaagcggatctggcgtgaagcagaccctgaatttcgacctgctgaagctggctggcgacgtggaatccaacccaggcccttctagaggccatatgaccgagtacaagcccacggtgcgcctcgccacccgcgacgacgtccccagggccgtacgcaccctcgccgccgcgttcgccgactaccccgccacgcgccacaccgtcgatccggaccgccacatcgagcgggtcaccgagctgcaagaactcttcctcacgcgcgtcgggctcgacatcggcaaggtgtgggtcgcggacgacggcgccgcggtggcggtctggaccacgccggagagcgtcgaagcgggggcggtgttcgccgagatcggcccgcgcatggccgagttgagcggttcccggctggccgcgcagcaacagatggaaggcctcctggcgccgcaccggcccaaggagcccgcgtggttcctggccaccgtcggcgtctcgcccgaccaccagggcaagggtctgggcagcgccgtcgtgctccccggagtggaggcggccgagcgcgccggggtgcccgccttcctggagacctccgcgccccgcaacctccccttctacgagcggctcggcttcaccgtcaccgccgacgtcgaggtgcccgaaggaccgcgcacctggtgcatgacccgcaagcccggtgcctga

SEQ ID NO: 8713 - DNA, 2532 bp, synthetic construct
  source 1..2532: mol_type = other DNA
atggccttaccagtgaccgccttgctcctgccgctggccttgctgctccacgccgccaggccggacatccagatgacacagactacatcctccctgtctgcctctctgggagacagagtcaccatcagttgcagggcaagtcaggacattagtaagtacctgaactggtatcagcagaaaccagatggaactgttaaactcctgatctaccatacatcaagattacactcaggagtcccatcaaggttcagtggcagtgggtctggaacagattattctctcaccattagcaacctggagcaagaagatattgccacttacttttgccaacagggtaatacgcttccgtacacgttcggaggggggaccaagctggagatcacactcgaggaggatctgagaaatgtgactccacccaaggtctccttgtttgagccatcaaaagcagagattgcaaacaaacaaaaggctaccctcgtgtgcttggccaggggcttcttccctgaccacgtggagctgagctggtgggtgaatggcaaggaggtccacagtggggtcagcacggaccctcaggcctacaaggagagcaattatagctactgcctgagcagccgcctgagggtctctgctaccttctggcacaatcctcgcaaccacttccgctgccaagtgcagttccatgggctttcagaggaggacaagtggccagagggctcacccaaacctgtcacacagaacatcagtgcagaggcctggggccgagcagactgtgggattacctcagcatcctatcaacaaggggtcttgtctgccaccatcctctatgagatcctgctagggaaagccaccctgtatgctgtgcttgtcagtacactggtggtgatggctatggtcaaaagaaagaattcaagggccaagcgatctggatctggagcaacaaacttctcactactcaaacaagcaggtgacgtggaggagaatcccgggcctactagtatggactggatttggcgcatccttttccttgtcggcgctgctaccggcgcgcattccttcgaagtgaaactgcaggagtcaggacctggcctggtggcgccctcacagagcctgtccgtcacatgcactgtctcaggggtctcattacccgactatggtgtaagctggattcgccagcctccacgaaagggtctggagtggctgggagtaatatggggtagtgaaaccacatactataattcagctctcaaatccagactgaccatcatcaaggacaactccaagagccaagttttcttaaaaatgaacagtctgcaaactgatgacacagccatttactactgtgccaaacattattactacggtggtagctatgctatggactactggggccaaggaacctcagtcaccgtctcctcaacgcgtatccagaacccagaacctgctgtgtaccagttaaaagatcctcggtctcaggacagcaccctctgcctgttcaccgactttgactcccaaatcaatgtgccgaaaaccatggaatctggaacgttcatcactgacaaaactgtgctggacatgaaagctatggattccaagagcaatggggccattgcctggagcaaccagacaagcttcacctgccaagatatcttcaaagagaccaacgccacctaccccagttcagacgttccctgtgatgccacgttgaccgagaaaagctttgaaacagatatgaacctaaactttcaaaacctgtcagttatgggactccgaatcctcctgctgaaagtagcgggatttaacctgctcatgacgctgaggctgtggtccagtcgcgccaagagaagcggatctggcgtgaagcagaccctgaatttcgacctgctgaagctggctggcgacgtggaatccaacccaggcccttctagaggccatatgaccgagtacaagcccacggtgcgcctcgccacccgcgacgacgtccccagggccgtacgcaccctcgccgccgcgttcgccgactaccccgccacgcgccacaccgtcgatccggaccgccacatcgagcgggtcaccgagctgcaagaactcttcctcacgcgcgtcgggctcgacatcggcaaggtgtgggtcgcggacgacggcgccgcggtggcggtctggaccacgccggagagcgtcgaagcgggggcggtgttcgccgagatcggcccgcgcatggccgagttgagcggttcccggctggccgcgcagcaacagatggaaggcctcctggcgccgcaccggcccaaggagcccgcgtggttcctggccaccgtcggcgtctcgcccgaccaccagggcaagggtctgggcagcgccgtcgtgctccccggagtggaggcggccgagcgcgccggggtgcccgccttcctggagacctccgcgccccgcaacctccccttctacgagcggctcggcttcaccgtcaccgccgacgtcgaggtgcccgaaggaccgcgcacctggtgcatgacccgcaagcccggtgcctga

SEQ ID NO: 8714 - DNA, 2541 bp, synthetic construct
  source 1..2541: mol_type = other DNA
atggccttaccagtgaccgccttgctcctgccgctggccttgctgctccacgccgccaggccggacatccagatgacacagagccctagcagcctgtctgccagcgtgggagacagagtgaccatcacatgcaaggccagcgaccacatcaacaactggctggcctggtatcagcagaagcctggacaggcccctaagctgctgatctacggcgctaccacactggaaacaggcgtgcccagcagattttctggcagcggctctggcaccgactacaccctgacaatatccagcctccagcctgaggacttcgccacctactactgtcagcagagctggaacaccccttggacattcggccagggcaccaagctggaaatcaagagactcgaggaggatctgagaaatgtgactccacccaaggtctccttgtttgagccatcaaaagcagagattgcaaacaaacaaaaggctaccctcgtgtgcttggccaggggcttcttccctgaccacgtggagctgagctggtgggtgaatggcaaggaggtccacagtggggtcagcacggaccctcaggcctacaaggagagcaattatagctactgcctgagcagccgcctgagggtctctgctaccttctggcacaatcctcgcaaccacttccgctgccaagtgcagttccatgggctttcagaggaggacaagtggccagagggctcacccaaacctgtcacacagaacatcagtgcagaggcctggggccgagcagactgtgggattacctcagcatcctatcaacaaggggtcttgtctgccaccatcctctatgagatcctgctagggaaagccaccctgtatgctgtgcttgtcagtacactggtggtgatggctatggtcaaaagaaagaattcaagggccaagcgatctggatctggagcaacaaacttctcactactcaaacaagcaggtgacgtggaggagaatcccgggcctactagtatggactggatttggcgcatccttttccttgtcggcgctgctaccggcgcgcattccttcgaacaagttcagcttcaacagcctggcgctgagctggtcaaacctggcgcttctgtgaagatgagctgcaaagccagcggctacgccttcagcagctactggatcaactggatgaagcagaaacccggccagggactcgaatggatcggccaaatctatcccggcgacggcgacaccaactacaacggcaagttcaagggcagagccacactgaccgccgatacctctagcagcacagcctacatgcagctgagcagcctgaccagcgaagatagcgccgtgtacttctgtgcccggtccatcacaacagtcgtgggctgcgctatggactattggggccagggaacaagcgtgaccgtgtctagtacgcgtatccagaacccagaacctgctgtgtaccagttaaaagatcctcggtctcaggacagcaccctctgcctgttcaccgactttgactcccaaatcaatgtgccgaaaaccatggaatctggaacgttcatcactgacaaaactgtgctggacatgaaagctatggattccaagagcaatggggccattgcctggagcaaccagacaagcttcacctgccaagatatcttcaaagagaccaacgccacctaccccagttcagacgttccctgtgatgccacgttgaccgagaaaagctttgaaacagatatgaacctaaactttcaaaacctgtcagttatgggactccgaatcctcctgctgaaagtagcgggatttaacctgctcatgacgctgaggctgtggtccagtcgcgccaagagaagcggatctggcgtgaagcagaccctgaatttcgacctgctgaagctggctggcgacgtggaatccaacccaggcccttctagaggccatatgaccgagtacaagcccacggtgcgcctcgccacccgcgacgacgtccccagggccgtacgcaccctcgccgccgcgttcgccgactaccccgccacgcgccacaccgtcgatccggaccgccacatcgagcgggtcaccgagctgcaagaactcttcctcacgcgcgtcgggctcgacatcggcaaggtgtgggtcgcggacgacggcgccgcggtggcggtctggaccacgccggagagcgtcgaagcgggggcggtgttcgccgagatcggcccgcgcatggccgagttgagcggttcccggctggccgcgcagcaacagatggaaggcctcctggcgccgcaccggcccaaggagcccgcgtggttcctggccaccgtcggcgtctcgcccgaccaccagggcaagggtctgggcagcgccgtcgtgctccccggagtggaggcggccgagcgcgccggggtgcccgccttcctggagacctccgcgccccgcaacctccccttctacgagcggctcggcttcaccgtcaccgccgacgtcgaggtgcccgaaggaccgcgcacctggtgcatgacccgcaagcccggtgcctga

SEQ ID NO: 8715 - DNA, 2382 bp, synthetic construct
  source 1..2382: mol_type = other DNA
atggccttaccagtgaccgccttgctcctgccgctggccttgctgctccacgccgccaggccggcatgcgctgagagcgaagatcggtatcggaaccccaagggtaccggcggaggcggatctggcggcggaggtagcggtggcggaggatctgaattcgacatccagatgacacagagccctagcagcctgtctgccagcgtgggagacagagtgaccatcacatgcaaggccagcgaccacatcaacaactggctggcctggtatcagcagaagcctggacaggcccctaagctgctgatctacggcgctaccacactggaaacaggcgtgcccagcagattttctggcagcggctctggcaccgactacaccctgacaatatccagcctccagcctgaggacttcgccacctactactgtcagcagagctggaacaccccttggacattcggccagggcaccaagctggaaatcaagagactcgaggacctgaagaacgtgttcccacctgaggtggccgtgttcgagcctagcgaggccgagatcagccacacccagaaagccaccctcgtgtgcctggctaccggcttctaccccgaccatgtggaactgtcttggtgggtcaacggcaaagaggtgcacagcggcgtgtgtaccgacccccagccactgaaagaacagcccgccctgaacgacagccggtactgcctgagcagcagactgagagtgtccgccaccttctggcagaacccccggaaccacttcagatgccaggtgcagttctacggcctgagcgagaacgacgagtggacccaggacagagccaagcccgtgacccagatcgtgtctgccgaagcctggggcagagccgattgcggctttaccagcgagagctaccagcagggcgtgctgagcgccaccatcctgtacgagatcctgctgggcaaggccaccctgtacgccgtgctggtgtctgccctggtgctgatggctatggtcaagcggaaggacagccggggaagggccaagcgatctggatctggagcaacaaacttctcactactcaaacaagcaggtgacgtggaggagaatcccgggcctactagtgccaccatggactggatttggcgcatccttttccttgtcggcgctgctaccggcgcccattccgggcccgaagtgcaactggttgaatccggtggcggcctggtgcaagcaggcggatctctcagacttagctgtgccgcctccggcagaaccttcacaatgggatggtttaggcaggctccagggaaagagagagagttcgtcgccgccatctctctgtctcccacactggcctactacgccgactctgtgaaaggccggttcaccatctccagagataatgccaagaacaccgtggtgctgcaaatgaactctctgaaacccgaggatacagccctgtactattgtgccgctgaccggaagtccgtgatgagcatcagacccgattactggggacagggcacacaagtcacagtgtcctctggatccggcggcggaggatctggcggaggcggatctgggggcggaggctctttcgaacaagttcagcttcaacagcctggcgctgagctggtcaaacctggcgcttctgtgaagatgagctgcaaagccagcggctacgccttcagcagctactggatcaactggatgaagcagaaacccggccagggactcgaatggatcggccaaatctatcccggcgacggcgacaccaactacaacggcaagttcaagggcagagccacactgaccgccgatacctctagcagcacagcctacatgcagctgagcagcctgaccagcgaagatagcgccgtgtacttctgtgcccggtccatcacaacagtcgtgggctgcgctatggactattggggccagggaacaagcgtgaccgtgtctagtacgcgtatccagaaccctgatcctgccgtgtaccagctgcgggatagcaagagcagcgacaagagcgtgtgtctgttcaccgacttcgacagccagaccaacgtgtcccagagcaaggactccgacgtgtacatcaccgataagtgcgtgctggacatgcggagcatggacttcaagagcaactccgccgtggcctggtccaacaagtccgatttcgcctgcgccaacgccttcaacaacagcattatccccgaggacacattcttcccaagccccgagagcagctgcgacgtgaagctggtggaaaagagcttcgagacagacaccaacctgaacttccagaacctgagcgtgatcggcttcagaatcctgctgctgaaagtggccggctttaacctgctgatgaccctgcggctgtggtccagctaa

SEQ ID NO: 8716 - DNA, 2664 bp, synthetic construct
  source 1..2664: mol_type = other DNA
atggccttaccagtgaccgccttgctcctgccgctggccttgctgctccacgccgccaggccggacatccagatgacacagagccctagcagcctgtctgccagcgtgggagacagagtgaccatcacatgcaaggccagcgaccacatcaacaactggctggcctggtatcagcagaagcctggacaggcccctaagctgctgatctacggcgctaccacactggaaacaggcgtgcccagcagattttctggcagcggctctggcaccgactacaccctgacaatatccagcctccagcctgaggacttcgccacctactactgtcagcagagctggaacaccccttggacattcggccagggcaccaagctggaaatcaagagactcgaggacctgaagaacgtgttcccacctgaggtggccgtgttcgagcctagcgaggccgagatcagccacacccagaaagccaccctcgtgtgcctggctaccggcttctaccccgaccatgtggaactgtcttggtgggtcaacggcaaagaggtgcacagcggcgtgtgtaccgacccccagccactgaaagaacagcccgccctgaacgacagccggtactgcctgagcagcagactgagagtgtccgccaccttctggcagaacccccggaaccacttcagatgccaggtgcagttctacggcctgagcgagaacgacgagtggacccaggacagagccaagcccgtgacccagatcgtgtctgccgaagcctggggcagagccgattgcggctttaccagcgagagctaccagcagggcgtgctgagcgccaccatcctgtacgagatcctgctgggcaaggccaccctgtacgccgtgctggtgtctgccctggtgctgatggctatggtcaagcggaaggacagccggggaagggccaagcgatctggatctggagcaacaaacttctcactactcaaacaagcaggtgacgtggaggagaatcccgggcctactagtgccaccatggactggatttggcgcatccttttccttgtcggcgctgctaccggcgcccattccgggcccgccgagagcgaggacagatacagaaaccccaaaggatccggcggcggaggatctggcggaggcggatctgggggcggaggctctttcgaacaagttcagcttcaacagcctggcgctgagctggtcaaacctggcgcttctgtgaagatgagctgcaaagccagcggctacgccttcagcagctactggatcaactggatgaagcagaaacccggccagggactcgaatggatcggccaaatctatcccggcgacggcgacaccaactacaacggcaagttcaagggcagagccacactgaccgccgatacctctagcagcacagcctacatgcagctgagcagcctgaccagcgaagatagcgccgtgtacttctgtgcccggtccatcacaacagtcgtgggctgcgctatggactattggggccagggaacaagcgtgaccgtgtctagtacgcgtatccagaaccctgatcctgccgtgtaccagctgcgggatagcaagagcagcgacaagagcgtgtgtctgttcaccgacttcgacagccagaccaacgtgtcccagagcaaggactccgacgtgtacatcaccgataagtgcgtgctggacatgcggagcatggacttcaagagcaactccgccgtggcctggtccaacaagtccgatttcgcctgcgccaacgccttcaacaacagcattatccccgaggacacattcttcccaagccccgagagcagctgcgacgtgaagctggtggaaaagagcttcgagacagacaccaacctgaacttccagaacctgagcgtgatcggcttcagaatcctgctgctgaaagtggccggctttaacctgctgatgaccctgcggctgtggtccagccgcgccaagagaagcggatctggcgtgaagcagaccctgaatttcgacctgctgaagctggctggcgacgtggaatccaacccaggcccttctagaggccatatgaccgagtacaagcccacggtgcgcctcgccacccgcgacgacgtccccagggccgtacgcaccctcgccgccgcgttcgccgactaccccgccacgcgccacaccgtcgatccggaccgccacatcgagcgggtcaccgagctgcaagaactcttcctcacgcgcgtcgggctcgacatcggcaaggtgtgggtcgcggacgacggcgccgcggtggcggtctggaccacgccggagagcgtcgaagcgggggcggtgttcgccgagatcggcccgcgcatggccgagttgagcggttcccggctggccgcgcagcaacagatggaaggcctcctggcgccgcaccggcccaaggagcccgcgtggttcctggccaccgtcggcgtctcgcccgaccaccagggcaagggtctgggcagcgccgtcgtgctccccggagtggaggcggccgagcgcgccggggtgcccgccttcctggagacctccgcgccccgcaacctccccttctacgagcggctcggcttcaccgtcaccgccgacgtcgaggtgcccgaaggaccgcgcacctggtgcatgacccgcaagcccggtgcctga

SEQ ID NO: 8717 - DNA, 1920 bp, synthetic construct
  source 1..1920: mol_type = other DNA
atggccttaccagtgaccgccttgctcctgccgctggccttgctgctccacgccgccaggccgctcgagatccagaaccctgatcctgccgtgtaccagctgcgggatagcaagagcagcgacaagagcgtgtgtctgttcaccgacttcgacagccagaccaacgtgtcccagagcaaggactccgacgtgtacatcaccgataagtgcgtgctggacatgcggagcatggacttcaagagcaactccgccgtggcctggtccaacaagtccgatttcgcctgcgccaacgccttcaacaacagcattatccccgaggacacattcttcccaagccccgagagcagctgcgacgtgaagctggtggaaaagagcttcgagacagacaccaacctgaacttccagaacctgagcgtgatcggcttcagaatcctgctgctgaaagtggccggctttaacctgctgatgaccctgcggctgtggtccagctctagtcgcgccaagagaagcggatctggcgtgaagcagaccctgaatttcgacctgctgaagctggctggcgacgtggaatccaacccaggccctactagcaccatggccttaccagtgaccgccttgctcctgccgctggccttgctgctccacgccgccaggccgcagatcgtgctgacacagagccccgccatcatgtctgttagccctggcgagaaagtgaccatgacctgtagcgccagcagcagcgtgaactacatgcactggttccagcagaagcccggcacaagccctaagctgtgggtgtacagcaccagcaatctggcctctggcgtgccagccagattttctggctctggcagcggcaccagctacagcctgacaatcagcagcatggaagccgaggatgccgccacctactattgtcagcagcggagcatctacccaccttggacatttggcggaggcaccaagctggaaatcaaaggcggaggcggaagtggaggcggaggatctggcggcggaggctctgaagttcagctccagcagagcggccctgagcttgtgaaacctggcgcttccgtgaagatcagctgcaaggccagcggctacagcttcaccggctacaccatgaactgggtcaagcagtcccacggcaagaacctggaatggatcggcctgattaacccctacaacggcggcacctcctacaaccagaagttcaaggccaaggccacactgaccgtggacaagagcagcagcacagcctacatgcagctgaagtccctgaccagcgaggacagcgccgtgtactactgcgccagagattacggctacgtgctggactattggggccagggcacaagcgtgacagtgtctagtacgcgtgaggacctgaagaacgtgttcccacctgaggtggccgtgttcgagcctagcgaggccgagatcagccacacccagaaagccaccctcgtgtgcctggctaccggcttctaccccgaccatgtggaactgtcttggtgggtcaacggcaaagaggtgcacagcggcgtgtgtaccgacccccagccactgaaagaacagcccgccctgaacgacagccggtactgcctgagcagcagactgagagtgtccgccaccttctggcagaacccccggaaccacttcagatgccaggtgcagttctacggcctgagcgagaacgacgagtggacccaggacagagccaagcccgtgacccagatcgtgtctgccgaagcctggggcagagccgattgcggctttaccagcgagagctaccagcagggcgtgctgagcgccaccatcctgtacgagatcctgctgggcaaggccaccctgtacgccgtgctggtgtctgccctggtgctgatggctatggtcaagcggaaggacagccggggataa

SEQ ID NO: 8718 - DNA, 2592 bp, synthetic construct
  source 1..2592: mol_type = other DNA
atggccttaccagtgaccgccttgctcctgccgctggccttgctgctccacgccgccaggccggcatgcgatattgtgatgacccagagccagaaattcatgagcaccagcgtgggcgacagagtgtccgtgacatgtaaagccagccagaacgtgggctctcacgtcggctggtatcagcagaagtctggacagagccccaaggcactgatctacagcgccagcaatcggtacatcggcgtgcccgatagattcaccggctctggcagcggcaccgatttcaccctgaccatcagcaacgtgcagtccgaggacctggccgagtatttctgccagcagtaccacatctacccctacacctttggaggcggcacccggctggaaatcaagagactcgaggccgcagcaaaggaggacctgaagaacgtgttcccacctgaggtggccgtgttcgagcctagcgaggccgagatcagccacacccagaaagccaccctcgtgtgcctggctaccggcttctaccccgaccatgtggaactgtcttggtgggtcaacggcaaagaggtgcacagcggcgtgtgtaccgacccccagccactgaaagaacagcccgccctgaacgacagccggtactgcctgagcagcagactgagagtgtccgccaccttctggcagaacccccggaaccacttcagatgccaggtgcagttctacggcctgagcgagaacgacgagtggacccaggacagagccaagcccgtgacccagatcgtgtctgccgaagcctggggcagagccgattgcggctttaccagcgagagctaccagcagggcgtgctgagcgccaccatcctgtacgagatcctgctgggcaaggccaccctgtacgccgtgctggtgtctgccctggtgctgatggctatggtcatggctgctggtggacctggtgctggatctgctgcccctgtgtctagcacatctagcctgcctctggccgctctgaacatgagagtcagaagaaggctgagcctgttcctgaacgtgcggactcaggtggccgctgattggacagctctggccgaggaaatggacttcgagtacctggaaatccggcagctggaaacccaggccgatcctacaggcagactgctggatgcttggcaaggcagacctggcgcttctgtggggagactgcttgagctgctgacaaagctgggcagagatgacgtgctgctggaactgggacctagcatcgaggaagattgccagaagtacatcctgaagcagcagcaagaggaagccgagaagcctctgcaagtggccgccgtggatagcagcgttccaagaacagctgagctggccggcatcaccacactggatgatcctctgggaaagaaggtggccaagaagcccaccaacaaggcccctcatcctaagcaagagccccaagagatcaacttccccgacgatctgcccggcagcaatactgctgctcccgtgcaagaaaccctgcacggttgtcagcccgtgacacaagaggacggcaaagaaagccggatcagcgtgcaagagagacagagggccaagcgatctggatctggagcaacaaacttctcactactcaaacaagcaggtgacgtggaggagaatcccgggcctactagtgccaccatggactggatttggcgcatccttttccttgtcggcgctgctaccggcgcccattccgggcccgccagaagcgaggacagatacagaaaccccaaaggatccggcggcggaggatctggcggaggcggatctgggggcggaggctctttcgaagttcagctgcttgagacaggcggaggactggttcaacctggcggaagcagaggactgagctgtgaaggcagcggctttaccttcagcggcttctggatgagctgggtccgacagacacctggcaagaccctggaatggatcggcgacatcaatagcgacggcagcagcatcaactacgcccctagcatcaaggacaggttcaccatcttccgggacaacgacaagagcatcctgtacctccagatgaccaacgtgcggagcgaggacaccggcacctacttttgtgtgaccacctacggcgactactggggccagggaacaaccctgacagtgtctagtacgcgtatccagaaccctgatcctgccgtgtaccagctgcgggatagcaagagcagcgacaagagcgtgtgtctgttcaccgacttcgacagccagaccaacgtgtcccagagcaaggactccgacgtgtacatcaccgataagtgcgtgctggacatgcggagcatggacttcaagagcaactccgccgtggcctggtccaacaagtccgatttcgcctgcgccaacgccttcaacaacagcattatccccgaggacacattcttcccaagccccgagagcagctgcgacgtgaagctggtggaaaagagcttcgagacagacaccaacctgaacttccagaacctgagcgtgatcggcttcagaatcctgctgctgaaagtggccggctttaacctgctgatgaccctgcggctgtggtccagctaa

SEQ ID NO: 8719 - DNA, 2541 bp, synthetic construct
  source 1..2541: mol_type = other DNA
atggccttaccagtgaccgccttgctcctgccgctggccttgctgctccacgccgccaggccggcatgcgctagagccgaagatcggtatcggggtaccggcggaggcggatctggcggcggaggtagcggtggcggaggatctgaattcggatctctcgagctgtgggtttcacagcctccagagatcagaaccctggaaggcagcagcgccttcctgccttgcagcttcaatgcctctcagggcagactggctatcggcagcgtgacctggttcagagatgaggtggtgcccggcaaagaagtgcggaacggcacccctgagtttagaggaaggctggcccctctggcctccagcagatttctgcacgatcaccaggccgagctgcacatcagagatgtgcgaggacacgacgccagcatctacgtgtgcagagtggaagtgctcggcctcggagttggcacaggcaatggaacaagactggtggtggaaaaagagcaccctcagctcggagccggaacagtgctgcttctgagagccggcttttacgccgtgtcctttctgtctgtggccgtgggcagcaccgtgtactatcagggcaagtgcctgacctggaagggacctagaaggcaactgcctgctgtggtgcctgctcctttgcctcctccatgtggaagctctgcccatctgctgccacctgttccaggcggaagggccaagcgatctggatctggagcaacaaacttctcactactcaaacaagcaggtgacgtggaggagaatcccgggcctactagtgccaccatggactggatttggcgcatccttttccttgtcggcgctgctaccggcgcccattccgggcccgaagtgcagctggttgaatctggcggaggactggttcaggctggcggatctctgagactgtcttgtgccgccagcggcagaacctttagcatgggctggtttagacaggcccctggcaaagagagagagttcgtcgccgccatcacatactctggcggcagcccttactacgccgactctgtgaagggcagattcaccatcagccgggacaacgccaagaacaccgtgtacctccagatgaacagcctgaagcctgaggacaccgccgtgtactactgcgccgccaatccaacatacggcagcgactggaacgccgagaattggggccagggaacccaagtgacagtgtctagcggatccggcggcggaggatctggcggaggcggatctgggggcggaggctctttcgaaggcagcacgcgtctgtgggtgtcccagccacctgaaattcggacactggaaggctcctccgcctttctgccctgtagctttaacgccagccaggggagactcgccatcggctctgtgacatggttccgggatgaagtcgtccctggaaaagaagttcgcaacggaacaccagagttcagaggcagactcgccccactggcaagctccagattcctgcatgaccatcaggctgaactgcacattagggacgtgcggggccacgatgcctccatctatgtgtgtcgggtcgaagtgcttggactcggcgtcggaactggaaacggcactaggctggtggtcgagaaagaacatccacagcttggcgctggcaccgtcctgttgcttagagccggattctatgccgtcagcttcctgtccgtggctgtggggtctacagtgtattaccagggaaaatgtctcacctggaaaggccccagacgccagcttccagctgttgttcctgctccactgccaccaccttgtggctcctctgctcacttgcttccaccagtgcctggcggacgcgccaagagaagcggatctggcgtgaagcagaccctgaatttcgacctgctgaagctggctggcgacgtggaatccaacccaggcccttctagaggccatatgaccgagtacaagcccacggtgcgcctcgccacccgcgacgacgtccccagggccgtacgcaccctcgccgccgcgttcgccgactaccccgccacgcgccacaccgtcgatccggaccgccacatcgagcgggtcaccgagctgcaagaactcttcctcacgcgcgtcgggctcgacatcggcaaggtgtgggtcgcggacgacggcgccgcggtggcggtctggaccacgccggagagcgtcgaagcgggggcggtgttcgccgagatcggcccgcgcatggccgagttgagcggttcccggctggccgcgcagcaacagatggaaggcctcctggcgccgcaccggcccaaggagcccgcgtggttcctggccaccgtcggcgtctcgcccgaccaccagggcaagggtctgggcagcgccgtcgtgctccccggagtggaggcggccgagcgcgccggggtgcccgccttcctggagacctccgcgccccgcaacctccccttctacgagcggctcggcttcaccgtcaccgccgacgtcgaggtgcccgaaggaccgcgcacctggtgcatgacccgcaagcccggtgcctga

SEQ ID NO: 8720 - DNA, 2448 bp, synthetic construct
  source 1..2448: mol_type = other DNA
atggccttaccagtgaccgccttgctcctgccgctggccttgctgctccacgccgccaggccggacatccagatgacacagactacatcctccctgtctgcctctctgggagacagagtcaccatcagttgcagggcaagtcaggacattagtaagtacctgaactggtatcagcagaaaccagatggaactgttaaactcctgatctaccatacatcaagattacactcaggagtcccatcaaggttcagtggcagtgggtctggaacagattattctctcaccattagcaacctggagcaagaagatattgccacttacttttgccaacagggtaatacgcttccgtacacgttcggaggggggaccaagctggagatcacactcgaggacctgaagaacgtgttcccacctgaggtggccgtgttcgagcctagcgaggccgagatcagccacacccagaaagccaccctcgtgtgcctggctaccggcttctaccccgaccatgtggaactgtcttggtgggtcaacggcaaagaggtgcacagcggcgtgtctaccgacccccagccactgaaagaacagcccgccctgaacgacagccggtactgcctgagcagcagactgagagtgtccgccaccttctggcagaacccccggaaccacttcagatgccaggtgcagttctacggcctgagcgagaacgacgagtggacccaggacagagccaagcccgtgacccagatcgtgtctgccgaagcctggggcagagccgattgcggatcccagagcttcggcctgctggaccccaagctgtgctacctgctggatggcatcctgttcatctacggcgtgatcctgaccgccctgttcctgagagtgaagttcagcagaagcgccgacgcccctgcctaccagcagggacagaaccaactgtacaacgagctgaacctgggcagacgggaagagtacgacgtgctggacaagcggagaggcagggaccctgagatgggcggaaagccccagcggagaaagaacccccaggaaggactgtataacgaactccagaaagacaagatggccgaagcctacagcgagatcggcatgaagggcgagcggagaagaggcaagggccacgatggcctgtaccagggcctgagcaccgccaccaaggacacctatgacgccctgcacatgcaggccctgcctccaagaagggccaagcgatctggatctggagcaacaaacttctcactactcaaacaagcaggtgacgtggaggagaatcccgggcctactagtatggactggatttggcgcatccttttccttgtcggcgctgctaccggcgcgcattccttcgaagtgaaactgcaggagtcaggacctggcctggtggcgccctcacagagcctgtccgtcacatgcactgtctcaggggtctcattacccgactatggtgtaagctggattcgccagcctccacgaaagggtctggagtggctgggagtaatatggggtagtgaaaccacatactataattcagctctcaaatccagactgaccatcatcaaggacaactccaagagccaagttttcttaaaaatgaacagtctgcaaactgatgacacagccatttactactgtgccaaacattattactacggtggtagctatgctatggactactggggccaaggaacctcagtcaccgtctcctcaacgcgtatccagaaccctgatcctgccgtgtaccagctgcgggatagcaagagcagcgacaagagcgtgtgtctgttcaccgacttcgacagccagaccaacgtgtcccagagcaaggactccgacgtgtacatcaccgataagaccgtgctggacatgcggagcatggacttcaagagcaactccgccgtggcctggtccaacaagtccgatttcgcctgcgccaacgccttcaacaacagcattatccccgaggacacattcttcccaagccccgagagcagctgcggtacccagagttttgggttgttggaccctaaattgtgctatctgttggacggaatcctgttcatttacggagtgatcctgaccgcattgttcctgcgggttaagttttccagatccgcagacgcacccgcttaccaacaagggcagaaccaactctacaatgaacttaatttggggcggagggaagagtacgacgttctggacaaaaggaggggacgagatcccgagatgggcggaaagcctcagcgaaggaagaatccgcaagaggggctttataacgaactccagaaagataaaatggcagaagcctatagtgagattgggatgaagggagaaaggaggaggggtaaaggtcacgatgggttgtaccaaggattgagcacagccactaaagatacctatgatgcgctccacatgcaggccctgccgccaagataa

SEQ ID NO: 8721 - DNA, 2448 bp, synthetic construct; identical to SEQ ID NO: 8720
  source 1..2448: mol_type = other DNA

SEQ ID NO: 8722 - DNA, 2448 bp, synthetic construct; identical to SEQ ID NO: 8720
  source 1..2448: mol_type = other DNA

SEQ ID NO: 8723 - DNA, 2862 bp, synthetic construct
  source 1..2862: mol_type = other DNA
atggccttaccagtgaccgccttgctcctgccgctggccttgctgctccacgccgccaggccggacatccagatgacacagactacatcctccctgtctgcctctctgggagacagagtcaccatcagttgcagggcaagtcaggacattagtaagtacctgaactggtatcagcagaaaccagatggaactgttaaactcctgatctaccatacatcaagattacactcaggagtcccatcaaggttcagtggcagtgggtctggaacagattattctctcaccattagcaacctggagcaagaagatattgccacttacttttgccaacagggtaatacgcttccgtacacgttcggaggggggaccaagctggagatcacactcgaggacctgaagaacgtgttcccacctgaggtggccgtgttcgagcctagcgaggccgagatcagccacacccagaaagccaccctcgtgtgcctggctaccggcttctaccccgaccatgtggaactgtcttggtgggtcaacggcaaagaggtgcacagcggcgtgtctaccgacccccagccactgaaagaacagcccgccctgaacgacagccggtactgcctgagcagcagactgagagtgtccgccaccttctggcagaacccccggaaccacttcagatgccaggtgcagttctacggcctgagcgagaacgacgagtggacccaggacagagccaagcccgtgacccagatcgtgtctgccgaagcctggggcagagccgattgcggatcccagagcttcggcctgctggaccccaagctgtgctacctgctggatggcatcctgttcatctacggcgtgatcctgaccgccctgttcctgagagtgaagttcagcagaagcgccgacgcccctgcctaccagcagggacagaaccaactgtacaacgagctgaacctgggcagacgggaagagtacgacgtgctggacaagcggagaggcagggaccctgagatgggcggaaagccccggagaaagaacccccaggaaggactgtataacgaactccagaaagacaagatggccgaagcctacagcgagatcggcatgaagggcgagcggagaagaggcaagggccacgatggcctgtaccagggcctgagcaccgccaccaaggacacctatgacgccctgcacatgcaggccctgcctccaagaagggccaagcgatctggatctggagcaacaaacttctcactactcaaacaagcaggtgacgtggaggagaatcccgggcctactagtgccaccatggactggatttggcgcatccttttccttgtcggcgctgctaccggcgcccattccgggcccgaagtgcagctggttgaatctggcggaggactggttcaggctggcggatctctgagactgtcttgtgccgccagcggcagaacctttagcatgggctggtttagacaggcccctggcaaagagagagagttcgtcgccgccatcacatactctggcggcagcccttactacgccgactctgtgaagggcagattcaccatcagccgggacaacgccaagaacaccgtgtacctccagatgaacagcctgaagcctgaggacaccgccgtgtactactgcgccgccaatccaacatacggcagcgactggaacgccgagaattggggccagggaacccaagtgacagtgtctagcggatccggcggcggaggatctggcggaggcggatctgggggcggaggctctttcgaagtgaaactgcaggagtcaggacctggcctggtggcgccctcacagagcctgtccgtcacatgcactgtctcaggggtctcattacccgactatggtgtaagctggattcgccagcctccacgaaagggtctggagtggctgggagtaatatggggtagtgaaaccacatactataattcagctctcaaatccagactgaccatcatcaaggacaactccaagagccaagttttcttaaaaatgaacagtctgcaaactgatgacacagccatttactactgtgccaaacattattactacggtggtagctatgctatggactactggggccaaggaacctcagtcaccgtctcctcaacgcgtatccagaaccctgatcctgccgtgtaccagctgcgggatagcaagagcagcgacaagagcgtgtgtctgttcaccgacttcgacagccagaccaacgtgtcccagagcaaggactccgacgtgtacatcaccgataagaccgtgctggacatgcggagcatggacttcaagagcaactccgccgtggcctggtccaacaagtccgatttcgcctgcgccaacgccttcaacaacagcattatccccgaggacacattcttcccaagccccgagagcagctgcggtacccagagttttgggttgttggaccctaaattgtgctatctgttggacggaatcctgttcatttacggagtgatcctgaccgcattgttcctgcgggttaagttttccagatccgcagacgcacccgcttaccaacaagggcagaaccaactctacaatgaacttaatttggggcggagggaagagtacgacgttctggacaaaaggaggggacgagatcccgagatgggcggaaagcctcagcgaaggaagaatccgcaagaggggctttataacgaactccagaaagataaaatggcagaagcctatagtgagattgggatgaagggagaaaggaggaggggtaaaggtcacgatgggttgtaccaaggattgagcacagccactaaagatacctatgatgcgctccacatgcaggccctgccgccaagataa

SEQ ID NO: 8724 - DNA, 3297 bp, synthetic construct
  source 1..3297: mol_type = other DNA
atggccttaccagtgaccgccttgctcctgccgctggccttgctgctccacgccgccaggccgagctacgtgctgacacagcctccatccgtgtctgtggctccaggacagaccgccagaatcacatgcggcggcaacaacatcggcggcaagagcgtgcactggtatcagcagccacctggacaggctccagtggtggtggtgtacgacgacagcgatagacctagcggcatccccgagagattcagcggcagcaattccggcaataccgccacactgaccatcagcagagtggaagctggcgacgaggccgtgtactactgccaagtgtgggacagcagcagcgatcacgtggtgtttggcggcggaacaaagctgacagtgcttctcgaggacctgaagaacgtgttcccacctgaggtggccgtgttcgagcctagcgaggccgagatcagccacacccagaaagccaccctcgtgtgcctggctaccggcttctaccccgaccatgtggaactgtcttggtgggtcaacggcaaagaggtgcacagcggcgtgtctaccgacccccagccactgaaagaacagcccgccctgaacgacagccggtactgcctgagcagcagactgagagtgtccgccaccttctggcagaacccccggaaccacttcagatgccaggtgcagttctacggcctgagcgagaacgacgagtggacccaggacagagccaagcccgtgacccagatcgtgtctgccgaagcctggggcagagccgattgcggatcccagagcttcggcctgctggaccccaagctgtgctacctgctggatggcatcctgttcatctacggcgtgatcctgaccgccctgttcctgaaacggggcagaaagaaactcctgtatatattcaaacaaccatttatgagaccagtacaaactactcaagaggaagatggctgtagctgccgatttccagaagaagaagaaggaggatgtgaactgagagtgaagttcagcagaagcgccgacgcccctgcctaccagcagggacagaaccaactgtacaacgagctgaacctgggcagacgggaagagtacgacgtgctggacaagcggagaggcagggaccctgagatgggcggaaagccccagcggagaaagaacccccaggaaggactgtataacgaactccagaaagacaagatggccgaagcctacagcgagatcggcatgaagggcgagcggagaagaggcaagggccacgatggcctgtaccagggcctgagcaccgccaccaaggacacctatgacgccctgcacatgcaggccctgcctccaagaagggccaagcgatctggatctggagcaacaaacttctcactactcaaacaagcaggtgacgtggaggagaatcccgggcctactagtatggactggatttggcgcatccttttccttgtcggcgctgctaccggcgcgcattccttcgaacaactccagctgcaagagtctggccctggcctggtcaagcctagcgaaacactgagcctgacctgtaccgtgtctggcggctctatcagctccagcagctatttctggggctggatcagacaacctcctggcaaaggactggaatggatcggctccatctactacagcggcatcacctactacaaccccagcctgaagtccagagtgaccatctccgtggacaccagcaagaaccagttctccctgaagctgagcagcgtgacagccgccgataccgccgtgtattattgtgccagacatgacggcgctgtggccggcctgtttgattattggggacagggcaccctggtcaccgtgtcatctgctacgcgtatccagaaccctgatcctgccgtgtaccagctgcgggatagcaagagcagcgacaagagcgtgtgtctgttcaccgacttcgacagccagaccaacgtgtcccagagcaaggactccgacgtgtacatcaccgataagaccgtgctggacatgcggagcatggacttcaagagcaactccgccgtggcctggtccaacaagtccgatttcgcctgcgccaacgccttcaacaacagcattatccccgaggacacattcttcccaagccccgagagcagctgcggtacccagagttttgggttgttggaccctaaattgtgctatctgttggacggaatcctgttcatttacggagtgatcctgaccgcattgttcctgcgggttaagttttccagatccgcagacgcacccgcttaccaacaagggcagaaccaactctacaatgaacttaatttggggcggagggaagagtacgacgttctggacaaaaggaggggacgagatcccgagatgggcggaaagcctcgaaggaagaatccgcaagaggggctttataacgaactccagaaagataaaatggcagaagcctatagtgagattgggatgaagggagaaaggaggaggggtaaaggtcacgatgggttgtaccaaggattgagcacagccactaaagatacctatgatgcgctccacatgcaggccctgccgccaagacgcgccaagagaagcggatctggcgtgaagcagaccctgaatttcgacctgctgaagctggctggcgacgtggaatccaacccaggcccttctagaatgtaccggatgcagctgctgagctgtatcgccctgtctctggccctggtcacaaatagcaactgggttaacgtgatctccgacctgaagaagatcgaggacctgatccagtccatgcacatcgacgccacactgtacaccgagagcgacgtgcaccctagctgtaaagtgaccgccatgaagtgctttctgctggaactgcaagtgatctccctggaaagcggcgacgccagcatccacgacaccgtgaagaacctgattatcctggctaacaacagcctgagcagcaacggcaacgtgaccgagtccggctgtaaagagtgcgaggaactggaagagaagaatatcaaagagttcctccagagcttcgtgcacatcgtgcagatgttcatcaacaccagcaagatcgaagtgatgtaccctcctccttacctggacaacgagaagtccaacggcaccatcatccacgtgaagggcaagcacctgtgtccttctccactgttccccggacctagcaagcctttctgggtgctcgttgttgttggcggcgtgctggcctgttacagcctgctggttaccgtggccttcatcatcttttgggtccgaagcaagcggagctaa

SEQ ID NO: 8725 - DNA, 2634 bp, synthetic construct
  source 1..2634: mol_type = other DNA
atggccttaccagtgaccgccttgctcctgccgctggccttgctgctccacgccgccaggccggacatccagatgacacagagccctagcagcctgtctgccagcgtgggagacagagtgaccatcacatgcaaggccagcgaccacatcaacaactggctggcctggtatcagcagaagcctggcaaggcccctaagctgctgatctacggcgctaccacactggaaacaggcgtgcccagcagattttctggcagcggctctggcaccgacttcaccctgacaatatccagcctccagcctgaggacttcgccacctactactgtcagcagagctggaacaccccttggacattcggccagggcaccaaggtggaaatcaagagactcgaggacctgaagaacgtgttcccacctgaggtggccgtgttcgagcctagcgaggccgagatcagccacacccagaaagccaccctcgtgtgcctggctaccggcttctaccccgaccatgtggaactgtcttggtgggtcaacggcaaagaggtgcacagcggcgtgtctaccgacccccagccactgaaagaacagcccgccctgaacgacagccggtactgcctgagcagcagactgagagtgtccgccaccttctggcagaacccccggaaccacttcagatgccaggtgcagttctacggcctgagcgagaacgacgagtggacccaggacagagccaagcccgtgacccagatcgtgtctgccgaagcctggggcagagccgattgcggatcccagagcttcggcctgctggaccccaagctgtgctacctgctggatggcatcctgttcatctacggcgtgatcctgaccgccctgttcctgagagtgaagttcagcagaagcgccgacgcccctgcctaccagcagggacagaaccaactgtacaacgagctgaacctgggcagacgggaagagtacgacgtgctggacaagcggagaggcagggaccctgagatgggcggaaagccccggagaaagaacccccaggaaggactgtataacgaactccagaaagacaagatggccgaagcctacagcgagatcggcatgaagggcgagcggagaagaggcaagggccacgatggcctgtaccagggcctgagcaccgccaccaaggacacctatgacgccctgcacatgcaggccctgcctccaagaagggccaagcgatctggatctggagcaacaaacttctcactactcaaacaagcaggtgacgtggaggagaatcccgggcctactagtgccaccatggactggatttggcgcatccttttccttgtcggcgctgctaccggcgcccattccgggccccagctccagctgcaagagtctggacctggcctggtcaagcctagcgagacactgagcctgacctgtaccgtgtccggcgatagcatcagcagcggcgattactactggggctggatcagacagcctcctggcaaaggactggaatggatcggccacatctactacagcggcatcagctactacaaccccagcctgaagtccagagtgaccatcagcgtggacaccagccggaaccagttctccctgaagctgtctagcgtgacagccgccgataccgccgtgtactactgcaccagagaggacagcagcaactggcggagtagaggccagggaacactggtcacagttagctctggatccggcggcggaggatctggcggaggcggatctgggggcggaggctctttcgaagttcagctggttgaatctggcggcggactggttcaacctggcggatctctgagactgagctgtgccgcctctggctacgcctttagcagctactgggtcaactgggttcgacaggcccctggcaaaggactggaatgggtcgcccaaatctatcccggcgacggcgacaccaactacaacggcaagttcaagggcagattcaccatcagccgggacaacagcaagaacaccctgtacctccagatgaactccctgagagccgaggacaccgccgtgtactattgtgccagatccatcaccaccgtcgtgggctgcgctatggattattggggccagggaaccctggtcaccgtgtcctctacgcgtatccagaaccctgatcctgccgtgtaccagctgcgggatagcaagagcagcgacaagagcgtgtgtctgttcaccgacttcgacagccagaccaacgtgtcccagagcaaggactccgacgtgtacatcaccgataagaccgtgctggacatgcggagcatggacttcaagagcaactccgccgtggcctggtccaacaagtccgatttcgcctgcgccaacgccttcaacaacagcattatccccgaggacacattcttcccaagccccgagagcagctgcggtaccatcactcaaggtttggcagtgtcaaccatctcatcattctttccacctggctaccaagtgtccttctgcctggtcatggtgctgctgttcgccgtggataccggcctgtacttcagcgtcaagaccaacatccggtccagcaccagagactggaaggaccacaagttcaagtggcggaaggaccctcaggacaagtaa

SEQ ID NO: 8726 - DNA, 2628 bp, synthetic construct
  source 1..2628: mol_type = other DNA
atggccttaccagtgaccgccttgctcctgccgctggccttgctgctccacgccgccaggccggacatccagatgacacagactacatcctccctgtctgcctctctgggagacagagtcaccatcagttgcagggcaagtcaggacattagtaagtacctgaactggtatcagcagaaaccagatggaactgttaaactcctgatctaccatacatcaagattacactcaggagtcccatcaaggttcagtggcagtgggtctggaacagattattctctcaccattagcaacctggagcaagaagatattgccacttacttttgccaacagggtaatacgcttccgtacacgttcggaggggggaccaagctggagatcacactcgaggacctgaagaacgtgttcccacctgaggtggccgtgttcgagcctagcgaggccgagatcagccacacccagaaagccaccctcgtgtgcctggctaccggcttctaccccgaccatgtggaactgtcttggtgggtcaacggcaaagaggtgcacagcggcgtgtctaccgacccccagccactgaaagaacagcccgccctgaacgacagccggtactgcctgagcagcagactgagagtgtccgccaccttctggcagaacccccggaaccacttcagatgccaggtgcagttctacggcctgagcgagaacgacgagtggacccaggacagagccaagcccgtgacccagatcgtgtctgccgaagcctggggcagagccgattgcggatcccagagcttcggcctgctggaccccaagctgtgctacctgctggatggcatcctgttcatctacggcgtgatcctgaccgccctgttcctgagagtgaagttcagcagaagcgccgacgcccctgcctaccagcagggacagaaccaactgtacaacgagctgaacctgggcagacgggaagagtacgacgtgctggacaagcggagaggcagggaccctgagatgggcggaaagccccggagaaagaacccccaggaaggactgtataacgaactccagaaagacaagatggccgaagcctacagcgagatcggcatgaagggcgagcggagaagaggcaagggccacgatggcctgtaccagggcctgagcaccgccaccaaggacacctatgacgccctgcacatgcaggccctgcctccaagaagggccaagcgatctggatctggagcaacaaacttctcactactcaaacaagcaggtgacgtggaggagaatcccgggcctactagtgccaccatggactggatttggcgcatccttttccttgtcggcgctgctaccggcgcccattccgggccccagctccagctgcaagagtctggacctggcctggtcaagcctagcgagacactgagcctgacctgtaccgtgtccggcgatagcatcagcagcggcgattactactggggctggatcagacagcctcctggcaaaggactggaatggatcggccacatctactacaacggcatcagctactacaaccccagcctgaagtccagagtgaccatcagcgtggacaccagccggaaccagttctccctgaagctgtctagcgtgacagccgccgataccgccgtgtactactgcaccagagaggacagcagcaactggcggagtagaggccagggaacactggtcacagttagctctggatccggcggcggaggatctggcggaggcggatctgggggcggaggctctttcgaagtgaaactgcaggagtcaggacctggcctggtggcgccctcacagagcctgtccgtcacatgcactgtctcaggggtctcattacccgactatggtgtaagctggattcgccagcctccacgaaagggtctggagtggctgggagtaatatggggtagtgaaaccacatactataattcagctctcaaatccagactgaccatcatcaaggacaactccaagagccaagttttcttaaaaatgaacagtctgcaaactgatgacacagccatttactactgtgccaaacattattactacggtggtagctatgctatggactactggggccaaggaacctcagtcaccgtctcctcaacgcgtatccagaaccctgatcctgccgtgtaccagctgcgggatagcaagagcagcgacaagagcgtgtgtctgttcaccgacttcgacagccagaccaacgtgtcccagagcaaggactccgacgtgtacatcaccgataagaccgtgctggacatgcggagcatggacttcaagagcaactccgccgtggcctggtccaacaagtccgatttcgcctgcgccaacgccttcaacaacagcattatccccgaggacacattcttcccaagccccgagagcagctgcggtaccatcactcaaggtttggcagtgtcaaccatctcatcattctttccacctggctaccaagtgtccttctgcctggtcatggtgctgctgttcgccgtggataccggcctgtacttcagcgtcaagaccaacatccggtccagcaccagagactggaaggaccacaagttcaagtggcggaaggaccctcaggacaagtaa

SEQ ID NO: 8727 - DNA, 2931 bp, synthetic construct
  source 1..2931: mol_type = other DNA
atggccttaccagtgaccgccttgctcctgccgctggccttgctgctccacgccgccaggccggacatccagatgacacagagccctagcagcctgtctgccagcgtgggagacagagtgaccatcacatgcaaggccagcgaccacatcaacaactggctggcctggtatcagcagaagcctggcaaggcccctaagctgctgatctacggcgctaccacactggaaacaggcgtgcccagcagattttctggcagcggctctggcaccgacttcaccctgacaatatccagcctccagcctgaggacttcgccacctactactgtcagcagagctggaacaccccttggacattcggccagggcaccaaggtggaaatcaagagactcgaggacctgaagaacgtgttcccacctgaggtggccgtgttcgagcctagcgaggccgagatcagccacacccagaaagccaccctcgtgtgcctggctaccggcttctaccccgaccatgtggaactgtcttggtgggtcaacggcaaagaggtgcacagcggcgtgtctaccgacccccagccactgaaagaacagcccgccctgaacgacagccggtactgcctgagcagcagactgagagtgtccgccaccttctggcagaacccccggaaccacttcagatgccaggtgcagttctacggcctgagcgagaacgacgagtggacccaggacagagccaagcccgtgacccagatcgtgtctgccgaagcctggggcagagccgattgcggatcccagagcttcggcctgctggaccccaagctgtgctacctgctggatggcatcctgttcatctacggcgtgatcctgaccgccctgttcctgagagtgaagttcagcagaagcgccgacgcccctgcctaccagcagggacagaaccaactgtacaacgagctgaacctgggcagacgggaagagtacgacgtgctggacaagcggagaggcagggaccctgagatgggcggaaagccccggagaaagaacccccaggaaggactgtataacgaactccagaaagacaagatggccgaagcctacagcgagatcggcatgaagggcgagcggagaagaggcaagggccacgatggcctgtaccagggcctgagcaccgccaccaaggacacctatgacgccctgcacatgcaggccctgcctccaagaagggccaagcgatctggatctggagcaacaaacttctcactactcaaacaagcaggtgacgtggaggagaatcccgggcctactagtatggactggatttggcgcatccttttccttgtcggcgctgctaccggcgcgcattccttcgaagttcagctggttgaatctggcggcggactggttcaacctggcggatctctgagactgagctgtgccgcctctggctacgcctttagcagctactgggtcaactgggttcgacaggcccctggcaaaggactggaatgggtcgcccaaatctatcccggcgacggcgacaccaactacaacggcaagttcaagggcagattcaccatcagccgggacaacagcaagaacaccctgtacctccagatgaactccctgagagccgaggacaccgccgtgtactattgtgccagatccatcaccaccgtcgtgggctgcgctatggattattggggccagggaaccctggtcaccgtgtcctctacgcgtatccagaaccctgatcctgccgtgtaccagctgcgggatagcaagagcagcgacaagagcgtgtgtctgttcaccgacttcgacagccagaccaacgtgtcccagagcaaggactccgacgtgtacatcaccgataagaccgtgctggacatgcggagcatggacttcaagagcaactccgccgtggcctggtccaacaagtccgatttcgcctgcgccaacgccttcaacaacagcattatccccgaggacacattcttcccaagccccgagagcagctgcggtaccatcactcaaggtttggcagtgtcaaccatctcatcattctttccacctggctaccaagtgtccttctgcctggtcatggtgctgctgttcgccgtggataccggcctgtacttcagcgtcaagaccaacatccggtccagcaccagagactggaaggaccacaagttcaagtggcggaaggaccctcaggacaagcgcgccaagagaagcggatctggcgtgaagcagaccctgaatttcgacctgctgaagctggctggcgacgtggaatccaacccaggcccttctagaatgtaccggatgcagctgctgagctgtatcgccctgtctctggccctggtcacaaatagcaactgggttaacgtgatctccgacctgaagaagatcgaggacctgatccagtccatgcacatcgacgccacactgtacaccgagagcgacgtgcaccctagctgtaaagtgaccgccatgaagtgctttctgctggaactgcaagtgatctccctggaaagcggcgacgccagcatccacgacaccgtgaagaacctgattatcctggctaacaacagcctgagcagcaacggcaacgtgaccgagtccggctgtaaagagtgcgaggaactggaagagaagaatatcaaagagttcctccagagcttcgtgcacatcgtgcagatgttcatcaacaccagcaagatcgaagtgatgtaccctcctccttacctggacaacgagaagtccaacggcaccatcatccacgtgaagggcaagcacctgtgtccttctccactgttccccggacctagcaagcctttctgggtgctcgttgttgttggcggcgtgctggcctgttacagcctgctggttaccgtggccttcatcatcttttgggtccgaagcaagcggagctaa

SEQ ID NO: 8728 - DNA, 2934 bp, synthetic construct
  source 1..2934: mol_type = other DNA
atggccttaccagtgaccgccttgctcctgccgctggccttgctgctccacgccgccaggccggacatccagatgacacagagccctagcagcctgtctgccagcgtgggagacagagtgaccatcacatgcaaggccagcgaccacatcaacaactggctggcctggtatcagcagaagcctggacaggcccctaagctgctgatctacggcgctaccacactggaaacaggcgtgcccagcagattttctggcagcggctctggcaccgactacaccctgacaatatccagcctccagcctgaggacttcgccacctactactgtcagcagagctggaacaccccttggacattcggccagggcaccaagctggaaatcaagagactcgaggacctgaagaacgtgttcccacctgaggtggccgtgttcgagcctagcgaggccgagatcagccacacccagaaagccaccctcgtgtgcctggctaccggcttctaccccgaccatgtggaactgtcttggtgggtcaacggcaaagaggtgcacagcggcgtgtctaccgacccccagccactgaaagaacagcccgccctgaacgacagccggtactgcctgagcagcagactgagagtgtccgccaccttctggcagaacccccggaaccacttcagatgccaggtgcagttctacggcctgagcgagaacgacgagtggacccaggacagagccaagcccgtgacccagatcgtgtctgccgaagcctggggcagagccgattgcggatcccagagcttcggcctgctggaccccaagctgtgctacctgctggatggcatcctgttcatctacggcgtgatcctgaccgccctgttcctgagagtgaagttcagcagaagcgccgacgcccctgcctaccagcagggacagaaccaactgtacaacgagctgaacctgggcagacgggaagagtacgacgtgctggacaagcggagaggcagggaccctgagatgggcggaaagccccggagaaagaacccccaggaaggactgtataacgaactccagaaagacaagatggccgaagcctacagcgagatcggcatgaagggcgagcggagaagaggcaagggccacgatggcctgtaccagggcctgagcaccgccaccaaggacacctatgacgccctgcacatgcaggccctgcctccaagaagggccaagcgatctggatctggagcaacaaacttctcactactcaaacaagcaggtgacgtggaggagaatcccgggcctactagtatggactggatttggcgcatccttttccttgtcggcgctgctaccggcgcgcattccttcgaacaagttcagcttcaacagcctggcgctgagctggtcaaacctggcgcttctgtgaagatgagctgcaaagccagcggctacgccttcagcagctactggatcaactggatgaagcagaaacccggccagggactcgaatggatcggccaaatctatcccggcgacggcgacaccaactacaacggcaagttcaagggcagagccacactgaccgccgatacctctagcagcacagcctacatgcagctgagcagcctgaccagcgaagatagcgccgtgtacttctgtgcccggtccatcacaacagtcgtgggctgcgctatggactattggggccagggaacaagcgtgaccgtgtctagtacgcgtatccagaaccctgatcctgccgtgtaccagctgcgggatagcaagagcagcgacaagagcgtgtgtctgttcaccgacttcgacagccagaccaacgtgtcccagagcaaggactccgacgtgtacatcaccgataagaccgtgctggacatgcggagcatggacttcaagagcaactccgccgtggcctggtccaacaagtccgatttcgcctgcgccaacgccttcaacaacagcattatccccgaggacacattcttcccaagccccgagagcagctgcggtaccatcactcaaggtttggcagtgtcaaccatctcatcattctttccacctggctaccaagtgtccttctgcctggtcatggtgctgctgttcgccgtggataccggcctgtacttcagcgtcaagaccaacatccggtccagcaccagagactggaaggaccacaagttcaagtggcggaaggaccctcaggacaagcgcgccaagagaagcggatctggcgtgaagcagaccctgaatttcgacctgctgaagctggctggcgacgtggaatccaacccaggcccttctagaatgtaccggatgcagctgctgagctgtatcgccctgtctctggccctggtcacaaatagcaactgggttaacgtgatctccgacctgaagaagatcgaggacctgatccagtccatgcacatcgacgccacactgtacaccgagagcgacgtgcaccctagctgtaaagtgaccgccatgaagtgctttctgctggaactgcaagtgatctccctggaaagcggcgacgccagcatccacgacaccgtgaagaacctgattatcctggctaacaacagcctgagcagcaacggcaacgtgaccgagtccggctgtaaagagtgcgaggaactggaagagaagaatatcaaagagttcctccagagcttcgtgcacatcgtgcagatgttcatcaacaccagcaagatcgaagtgatgtaccctcctccttacctggacaacgagaagtccaacggcaccatcatccacgtgaagggcaagcacctgtgtccttctccactgttccccggacctagcaagcctttctgggtgctcgttgttgttggcggcgtgctggcctgttacagcctgctggttaccgtggccttcatcatcttttgggtccgaagcaagcggagctaa

SEQ ID NO: 8729 - DNA, 3063 bp, synthetic construct
  source 1..3063: mol_type = other DNA
atggccttaccagtgaccgccttgctcctgccgctggccttgctgctccacgccgccaggccggacatccagatgacacagagccctagcagcctgtctgccagcgtgggagacagagtgaccatcacatgcaaggccagcgaccacatcaacaactggctggcctggtatcagcagaagcctggacaggcccctaagctgctgatctacggcgctaccacactggaaacaggcgtgcccagcagattttctggcagcggctctggcaccgactacaccctgacaatatccagcctccagcctgaggacttcgccacctactactgtcagcagagctggaacaccccttggacattcggccagggcaccaagctggaaatcaagagactcgaggacctgaagaacgtgttcccacctgaggtggccgtgttcgagcctagcgaggccgagatcagccacacccagaaagccaccctcgtgtgcctggctaccggcttctaccccgaccatgtggaactgtcttggtgggtcaacggcaaagaggtgcacagcggcgtgtctaccgacccccagccactgaaagaacagcccgccctgaacgacagccggtactgcctgagcagcagactgagagtgtccgccaccttctggcagaacccccggaaccacttcagatgccaggtgcagttctacggcctgagcgagaacgacgagtggacccaggacagagccaagcccgtgacccagatcgtgtctgccgaagcctggggcagagccgattgcggatcccagagcttcggcctgctggaccccaagctgtgctacctgctggatggcatcctgttcatctacggcgtgatcctgaccgccctgttcctgaaacggggcagaaagaaactcctgtatatattcaaacaaccatttatgagaccagtacaaactactcaagaggaagatggctgtagctgccgatttccagaagaagaagaaggaggatgtgaactgagagtgaagttcagcagaagcgccgacgcccctgcctaccagcagggacagaaccaactgtacaacgagctgaacctgggcagacgggaagagtacgacgtgctggacaagcggagaggcagggaccctgagatgggcggaaagccccagcggagaaagaacccccaggaaggactgtataacgaactccagaaagacaagatggccgaagcctacagcgagatcggcatgaagggcgagcggagaagaggcaagggccacgatggcctgtaccagggcctgagcaccgccaccaaggacacctatgacgccctgcacatgcaggccctgcctccaagaagggccaagcgatctggatctggagcaacaaacttctcactactcaaacaagcaggtgacgtggaggagaatcccgggcctactagtatggactggatttggcgcatccttttccttgtcggcgctgctaccggcgcgcattccttcgaacaagttcagcttcaacagcctggcgctgagctggtcaaacctggcgcttctgtgaagatgagctgcaaagccagcggctacgccttcagcagctactggatcaactggatgaagcagaaacccggccagggactcgaatggatcggccaaatctatcccggcgacggcgacaccaactacaacggcaagttcaagggcagagccacactgaccgccgatacctctagcagcacagcctacatgcagctgagcagcctgaccagcgaagatagcgccgtgtacttctgtgcccggtccatcacaacagtcgtgggctgcgctatggactattggggccagggaacaagcgtgaccgtgtctagtacgcgtatccagaaccctgatcctgccgtgtaccagctgcgggatagcaagagcagcgacaagagcgtgtgtctgttcaccgacttcgacagccagaccaacgtgtcccagagcaaggactccgacgtgtacatcaccgataagaccgtgctggacatgcggagcatggacttcaagagcaactccgccgtggcctggtccaacaagtccgatttcgcctgcgccaacgccttcaacaacagcattatccccgaggacacattcttcccaagccccgagagcagctgcggtaccatcactcaaggtttggcagtgtcaaccatctcatcattctttccacctggctaccaagtgtccttctgcctggtcatggtgctgctgttcgccgtggataccggcctgtacttcagcgtcaagaccaacatccggtccagcaccagagactggaaggaccacaagttcaagtggcggaaggaccctcaggacaagcgcgccaagagaagcggatctggcgtgaagcagaccctgaatttcgacctgctgaagctggctggcgacgtggaatccaacccaggcccttctagaatgtaccggatgcagctgctgagctgtatcgccctgtctctggccctggtcacaaatagcaactgggttaacgtgatctccgacctgaagaagatcgaggacctgatccagtccatgcacatcgacgccacactgtacaccgagagcgacgtgcaccctagctgtaaagtgaccgccatgaagtgctttctgctggaactgcaagtgatctccctggaaagcggcgacgccagcatccacgacaccgtgaagaacctgattatcctggctaacaacagcctgagcagcaacggcaacgtgaccgagtccggctgtaaagagtgcgaggaactggaagagaagaatatcaaagagttcctccagagcttcgtgcacatcgtgcagatgttcatcaacaccagcaagatcgaagtgatgtaccctcctccttacctggacaacgagaagtccaacggcaccatcatccacgtgaagggcaagcacctgtgtccttctccactgttccccggacctagcaagcctttctgggtgctcgttgttgttggcggcgtgctggcctgttacagcctgctggttaccgtggccttcatcatcttttgggtccgaagcaagcggagctaa

SEQ ID NO: 8730 - DNA, 2220 bp, synthetic construct; identical to SEQ ID NO: 5071
  source 1..2220: mol_type = other DNA

SEQ ID NO: 8731 - DNA, 2634 bp, synthetic construct
  source 1..2634: mol_type = other DNA
atggccttaccagtgaccgccttgctcctgccgctggccttgctgctccacgccgccaggccggacatccagatgacacagagccctagcagcctgtctgccagcgtgggagacagagtgaccatcacatgcaaggccagcgaccacatcaacaactggctggcctggtatcagcagaagcctggcaaggcccctaagctgctgatctacggcgctaccacactggaaacaggcgtgcccagcagattttctggcagcggctctggcaccgacttcaccctgacaatatccagcctccagcctgaggacttcgccacctactactgtcagcagagctggaacaccccttggacattcggccagggcaccaaggtggaaatcaagagactcgaggacctgaagaacgtgttcccacctgaggtggccgtgttcgagcctagcgaggccgagatcagccacacccagaaagccaccctcgtgtgcctggctaccggcttctaccccgaccatgtggaactgtcttggtgggtcaacggcaaagaggtgcacagcggcgtgtctaccgacccccagccactgaaagaacagcccgccctgaacgacagccggtactgcctgagcagcagactgagagtgtccgccaccttctggcagaacccccggaaccacttcagatgccaggtgcagttctacggcctgagcgagaacgacgagtggacccaggacagagccaagcccgtgacccagatcgtgtctgccgaagcctggggcagagccgattgcggatcccagagcttcggcctgctggaccccaagctgtgctacctgctggatggcatcctgttcatctacggcgtgatcctgaccgccctgttcctgagagtgaagttcagcagaagcgccgacgcccctgcctaccagcagggacagaaccaactgtacaacgagctgaacctgggcagacgggaagagtacgacgtgctggacaagcggagaggcagggaccctgagatgggcggaaagccccggagaaagaacccccaggaaggactgtataacgaactccagaaagacaagatggccgaagcctacagcgagatcggcatgaagggcgagcggagaagaggcaagggccacgatggcctgtaccagggcctgagcaccgccaccaaggacacctatgacgccctgcacatgcaggccctgcctccaagaagggccaagcgatctggatctggagcaacaaacttctcactactcaaacaagcaggtgacgtggaggagaatcccgggcctactagtgccaccatggactggatttggcgcatccttttccttgtcggcgctgctaccggcgcccattccgggccccagctccagctgcaagagtctggacctggcctggtcaagcctagcgagacactgagcctgacctgtaccgtgtccggcgatagcatcagcagcggcgattactactggggctggatcagacagcctcctggcaaaggactggaatggatcggccacatctactacaacggcatcagctactacaaccccagcctgaagtccagagtgaccatcagcgtggacaccagccggaaccagttctccctgaagctgtctagcgtgacagccgccgataccgccgtgtactactgcaccagagaggacagcagcaactggcggagtagaggccagggaacactggtcacagttagctctggatccggcggcggaggatctggcggaggcggatctgggggcggaggctctttcgaagttcagctggttgaatctggcggcggactggttcaacctggcggatctctgagactgagctgtgccgcctctggctacgcctttagcagctactgggtcaactgggttcgacaggcccctggcaaaggactggaatgggtcgcccaaatctatcccggcgacggcgacaccaactacaacggcaagttcaagggcagattcaccatcagccgggacaacagcaagaacaccctgtacctccagatgaactccctgagagccgaggacaccgccgtgtactattgtgccagatccatcaccaccgtcgtgggctgcgctatggattattggggccagggaaccctggtcaccgtgtcctctacgcgtatccagaaccctgatcctgccgtgtaccagctgcgggatagcaagagcagcgacaagagcgtgtgtctgttcaccgacttcgacagccagaccaacgtgtcccagagcaaggactccgacgtgtacatcaccgataagaccgtgctggacatgcggagcatggacttcaagagcaactccgccgtggcctggtccaacaagtccgatttcgcctgcgccaacgccttcaacaacagcattatccccgaggacacattcttcccaagccccgagagcagctgcggtaccatcactcaaggtttggcagtgtcaaccatctcatcattctttccacctggctaccaagtgtccttctgcctggtcatggtgctgctgttcgccgtggataccggcctgtacttcagcgtcaagaccaacatccggtccagcaccagagactggaaggaccacaagttcaagtggcggaaggaccctcaggacaagtaa

SEQ ID NO: 8732 - DNA, 2628 bp, synthetic construct
  source 1..2628: mol_type = other DNA
atggccttaccagtgaccgccttgctcctgccgctggccttgctgctccacgccgccaggccggacatccagatgacacagactacatcctccctgtctgcctctctgggagacagagtcaccatcagttgcagggcaagtcaggacattagtaagtacctgaactggtatcagcagaaaccagatggaactgttaaactcctgatctaccatacatcaagattacactcaggagtcccatcaaggttcagtggcagtgggtctggaacagattattctctcaccattagcaacctggagcaagaagatattgccacttacttttgccaacagggtaatacgcttccgtacacgttcggaggggggaccaagctggagatcacactcgaggacctgaagaacgtgttcccacctgaggtggccgtgttcgagcctagcgaggccgagatcagccacacccagaaagccaccctcgtgtgcctggctaccggcttctaccccgaccatgtggaactgtcttggtgggtcaacggcaaagaggtgcacagcggcgtgtctaccgacccccagccactgaaagaacagcccgccctgaacgacagccggtactgcctgagcagcagactgagagtgtccgccaccttctggcagaacccccggaaccacttcagatgccaggtgcagttctacggcctgagcgagaacgacgagtggacccaggacagagccaagcccgtgacccagatcgtgtctgccgaagcctggggcagagccgattgcggatcccagagcttcggcctgctggaccccaagctgtgctacctgctggatggcatcctgttcatctacggcgtgatcctgaccgccctgttcctgagagtgaagttcagcagaagcgccgacgcccctgcctaccagcagggacagaaccaactgtacaacgagctgaacctgggcagacgggaagagtacgacgtgctggacaagcggagaggcagggaccctgagatgggcggaaagccccggagaaagaacccccaggaaggactgtataacgaactccagaaagacaagatggccgaagcctacagcgagatcggcatgaagggcgagcggagaagaggcaagggccacgatggcctgtaccagggcctgagcaccgccaccaaggacacctatgacgccctgcacatgcaggccctgcctccaagaagggccaagcgatctggatctggagcaacaaacttctcactactcaaacaagcaggtgacgtggaggagaatcccgggcctactagtgccaccatggactggatttggcgcatccttttccttgtcggcgctgctaccggcgcccattccgggcccgaagtgcagctggttgaatctggcggaggactggttcaggctggcggatctctgagactgtcttgtgccgccagcggcagaacctttagcatgggctggtttagacaggcccctggcaaagagagagagttcgtcgccgccatcacatactctggcggcagcccttactacgccgactctgtgaagggcagattcaccatcagccgggacaacgccaagaacaccgtgtacctccagatgaacagcctgaagcctgaggacaccgccgtgtactactgcgccgccaatccaacatacggcagcgactggaacgccgagaattggggccagggaacccaagtgacagtgtctagcggatccggcggcggaggatctggcggaggcggatctgggggcggaggctctttcgaagtgaaactgcaggagtcaggacctggcctggtggcgccctcacagagcctgtccgtcacatgcactgtctcaggggtctcattacccgactatggtgtaagctggattcgccagcctccacgaaagggtctggagtggctgggagtaatatggggtagtgaaaccacatactataattcagctctcaaatccagactgaccatcatcaaggacaactccaagagccaagttttcttaaaaatgaacagtctgcaaactgatgacacagccatttactactgtgccaaacattattactacggtggtagctatgctatggactactggggccaaggaacctcagtcaccgtctcctcaacgcgtatccagaaccctgatcctgccgtgtaccagctgcgggatagcaagagcagcgacaagagcgtgtgtctgttcaccgacttcgacagccagaccaacgtgtcccagagcaaggactccgacgtgtacatcaccgataagaccgtgctggacatgcggagcatggacttcaagagcaactccgccgtggcctggtccaacaagtccgatttcgcctgcgccaacgccttcaacaacagcattatccccgaggacacattcttcccaagccccgagagcagctgcggtaccatcactcaaggtttggcagtgtcaaccatctcatcattctttccacctggctaccaagtgtccttctgcctggtcatggtgctgctgttcgccgtggataccggcctgtacttcagcgtcaagaccaacatccggtccagcaccagagactggaaggaccacaagttcaagtggcggaaggaccctcaggacaagtaa

SEQ ID NO: 8733 - DNA, 3342 bp, synthetic construct
  source 1..3342: mol_type = other DNA
atggccttaccagtgaccgccttgctcctgccgctggccttgctgctccacgccgccaggccggacatccagatgacacagactacatcctccctgtctgcctctctgggagacagagtcaccatcagttgcagggcaagtcaggacattagtaagtacctgaactggtatcagcagaaaccagatggaactgttaaactcctgatctaccatacatcaagattacactcaggagtcccatcaaggttcagtggcagtgggtctggaacagattattctctcaccattagcaacctggagcaagaagatattgccacttacttttgccaacagggtaatacgcttccgtacacgttcggaggggggaccaagctggagatcacactcgaggacctgaagaacgtgttcccacctgaggtggccgtgttcgagcctagcgaggccgagatcagccacacccagaaagccaccctcgtgtgcctggctaccggcttctaccccgaccatgtggaactgtcttggtgggtcaacggcaaagaggtgcacagcggcgtgtctaccgacccccagccactgaaagaacagcccgccctgaacgacagccggtactgcctgagcagcagactgagagtgtccgccaccttctggcagaacccccggaaccacttcagatgccaggtgcagttctacggcctgagcgagaacgacgagtggacccaggacagagccaagcccgtgacccagatcgtgtctgccgaagcctggggcagagccgattgcggatcccagagcttcggcctgctggaccccaagctgtgctacctgctggatggcatcctgttcatctacggcgtgatcctgaccgccctgttcctgagagtgaagttcagcagaagcgccgacgcccctgcctaccagcagggacagaaccaactgtacaacgagctgaacctgggcagacgggaagagtacgacgtgctggacaagcggagaggcagggaccctgagatgggcggaaagccccggagaaagaacccccaggaaggactgtataacgaactccagaaagacaagatggccgaagcctacagcgagatcggcatgaagggcgagcggagaagaggcaagggccacgatggcctgtaccagggcctgagcaccgccaccaaggacacctatgacgccctgcacatgcaggccctgcctccaagaagggccaagcgatctggatctggagcaacaaacttctcactactcaaacaagcaggtgacgtggaggagaatcccgggcctactagtgccaccatggactggatttggcgcatccttttccttgtcggcgctgctaccggcgcccattccgggcccgaagtgcagctggttgaatctggcggaggactggttcaggctggcggatctctgagactgtcttgtgccgccagcggcagaacctttagcatgggctggtttagacaggcccctggcaaagagagagagttcgtcgccgccatcacatactctggcggcagcccttactacgccgactctgtgaagggcagattcaccatcagccgggacaacgccaagaacaccgtgtacctccagatgaacagcctgaagcctgaggacaccgccgtgtactactgcgccgccaatccaacatacggcagcgactggaacgccgagaattggggccagggaacccaagtgacagtgtctagcggatccggcggcggaggatctggcggaggcggatctgggggcggaggctctttcgaagtgaaactgcaggagtcaggacctggcctggtggcgccctcacagagcctgtccgtcacatgcactgtctcaggggtctcattacccgactatggtgtaagctggattcgccagcctccacgaaagggtctggagtggctgggagtaatatggggtagtgaaaccacatactataattcagctctcaaatccagactgaccatcatcaaggacaactccaagagccaagttttcttaaaaatgaacagtctgcaaactgatgacacagccatttactactgtgccaaacattattactacggtggtagctatgctatggactactggggccaaggaacctcagtcaccgtctcctcaacgcgtatccagaaccctgatcctgccgtgtaccagctgcgggatagcaagagcagcgacaagagcgtgtgtctgttcaccgacttcgacagccagaccaacgtgtcccagagcaaggactccgacgtgtacatcaccgataagaccgtgctggacatgcggagcatggacttcaagagcaactccgccgtggcctggtccaacaagtccgatttcgcctgcgccaacgccttcaacaacagcattatccccgaggacacattcttcccaagccccgagagcagctgcggtaccatcactcaaggtttggcagtgtcaaccatctcatcattctttccacctggctaccaagtgtccttctgcctggtcatggtgctgctgttcgccgtggataccggcctgtacttcagcgtcaagaccaacatccggtccagcaccagagactggaaggaccacaagttcaagtggcggaaggaccctcaggacaagcgcgccaagagaagcggatctggcgtgaagcagaccctgaatttcgacctgctgaagctggctggcgacgtggaatccaacccaggcccttctagaatgtaccggatgcagctgctgagctgtatcgccctgtctctggccctggtcacaaatagcaactgggttaacgtgatctccgacctgaagaagatcgaggacctgatccagtccatgcacatcgacgccacactgtacaccgagagcgacgtgcaccctagctgtaaagtgaccgccatgaagtgctttctgctggaactgcaagtgatctccctggaaagcggcgacgccagcatccacgacaccgtgaagaacctgattatcctggctaacaacagcctgagcagcaacggcaacgtgaccgagtccggctgtaaagagtgcgaggaactggaagagaagaatatcaaagagttcctccagagcttcgtgcacatcgtgcagatgttcatcaacaccagcaagatcgaagtgatgtaccctcctccttacctggacaacgagaagtccaacggcaccatcatccacgtgaagggcaagcacctgtgtccttctccactgttccccggacctagcaagcctttctgggtgctcgttgttgttggcggcgtgctggcctgttacagcctgctggttaccgtggccttcatcatcttttgggtccgaagcaagcggagctaa

SEQ ID NO: 8734 - DNA, 3342 bp, synthetic construct
  source 1..3342: mol_type = other DNA
atggccttaccagtgaccgccttgctcctgccgctggccttgctgctccacgccgccaggccggacatccagatgacacagactacatcctccctgtctgcctctctgggagacagagtcaccatcagttgcagggcaagtcaggacattagtaagtacctgaactggtatcagcagaaaccagatggaactgttaaactcctgatctaccatacatcaagattacactcaggagtcccatcaaggttcagtggcagtgggtctggaacagattattctctcaccattagcaacctggagcaagaagatattgccacttacttttgccaacagggtaatacgcttccgtacacgttcggaggggggaccaagctggagatcacactcgaggacctgaagaacgtgttcccacctgaggtggccgtgttcgagcctagcgaggccgagatcagccacacccagaaagccaccctcgtgtgcctggctaccggcttctaccccgaccatgtggaactgtcttggtgggtcaacggcaaagaggtgcacagcggcgtgtctaccgacccccagccactgaaagaacagcccgccctgaacgacagccggtactgcctgagcagcagactgagagtgtccgccaccttctggcagaacccccggaaccacttcagatgccaggtgcagttctacggcctgagcgagaacgacgagtggacccaggacagagccaagcccgtgacccagatcgtgtctgccgaagcctggggcagagccgattgcggatcccagagcttcggcctgctggaccccaagctgtgctacctgctggatggcatcctgttcatctacggcgtgatcctgaccgccctgttcctgagagtgaagttcagcagaagcgccgacgcccctgcctaccagcagggacagaaccaactgtacaacgagctgaacctgggcagacgggaagagtacgacgtgctggacaagcggagaggcagggaccctgagatgggcggaaagccccggagaaagaacccccaggaaggactgtataacgaactccagaaagacaagatggccgaagcctacagcgagatcggcatgaagggcgagcggagaagaggcaagggccacgatggcctgtaccagggcctgagcaccgccaccaaggacacctatgacgccctgcacatgcaggccctgcctccaagaagggccaagcgatctggatctggagcaacaaacttctcactactcaaacaagcaggtgacgtggaggagaatcccgggcctactagtgccaccatggactggatttggcgcatccttttccttgtcggcgctgctaccggcgcccattccgggccccagctccagctgcaagagtctggacctggcctggtcaagcctagcgagacactgagcctgacctgtaccgtgtccggcgatagcatcagcagcggcgattactactggggctggatcagacagcctcctggcaaaggactggaatggatcggccacatctactacaacggcatcagctactacaaccccagcctgaagtccagagtgaccatcagcgtggacaccagccggaaccagttctccctgaagctgtctagcgtgacagccgccgataccgccgtgtactactgcaccagagaggacagcagcaactggcggagtagaggccagggaacactggtcacagttagctctggatccggcggcggaggatctggcggaggcggatctgggggcggaggctctttcgaagtgaaactgcaggagtcaggacctggcctggtggcgccctcacagagcctgtccgtcacatgcactgtctcaggggtctcattacccgactatggtgtaagctggattcgccagcctccacgaaagggtctggagtggctgggagtaatatggggtagtgaaaccacatactataattcagctctcaaatccagactgaccatcatcaaggacaactccaagagccaagttttcttaaaaatgaacagtctgcaaactgatgacacagccatttactactgtgccaaacattattactacggtggtagctatgctatggactactggggccaaggaacctcagtcaccgtctcctcaacgcgtatccagaaccctgatcctgccgtgtaccagctgcgggatagcaagagcagcgacaagagcgtgtgtctgttcaccgacttcgacagccagaccaacgtgtcccagagcaaggactccgacgtgtacatcaccgataagaccgtgctggacatgcggagcatggacttcaagagcaactccgccgtggcctggtccaacaagtccgatttcgcctgcgccaacgccttcaacaacagcattatccccgaggacacattcttcccaagccccgagagcagctgcggtaccatcactcaaggtttggcagtgtcaaccatctcatcattctttccacctggctaccaagtgtccttctgcctggtcatggtgctgctgttcgccgtggataccggcctgtacttcagcgtcaagaccaacatccggtccagcaccagagactggaaggaccacaagttcaagtggcggaaggaccctcaggacaagcgcgccaagagaagcggatctggcgtgaagcagaccctgaatttcgacctgctgaagctggctggcgacgtggaatccaacccaggcccttctagaatgtaccggatgcagctgctgagctgtatcgccctgtctctggccctggtcacaaatagcaactgggttaacgtgatctccgacctgaagaagatcgaggacctgatccagtccatgcacatcgacgccacactgtacaccgagagcgacgtgcaccctagctgtaaagtgaccgccatgaagtgctttctgctggaactgcaagtgatctccctggaaagcggcgacgccagcatccacgacaccgtgaagaacctgattatcctggctaacaacagcctgagcagcaacggcaacgtgaccgagtccggctgtaaagagtgcgaggaactggaagagaagaatatcaaagagttcctccagagcttcgtgcacatcgtgcagatgttcatcaacaccagcaagatcgaagtgatgtaccctcctccttacctggacaacgagaagtccaacggcaccatcatccacgtgaagggcaagcacctgtgtccttctccactgttccccggacctagcaagcctttctgggtgctcgttgttgttggcggcgtgctggcctgttacagcctgctggttaccgtggccttcatcatcttttgggtccgaagcaagcggagctaa

SEQ ID NO: 8735 - DNA, 3342 bp, synthetic construct
  source 1..3342: mol_type = other DNA
atggccttaccagtgaccgccttgctcctgccgctggccttgctgctccacgccgccaggccggacatccagatgacacagactacatcctccctgtctgcctctctgggagacagagtcaccatcagttgcagggcaagtcaggacattagtaagtacctgaactggtatcagcagaaaccagatggaactgttaaactcctgatctaccatacatcaagattacactcaggagtcccatcaaggttcagtggcagtgggtctggaacagattattctctcaccattagcaacctggagcaagaagatattgccacttacttttgccaacagggtaatacgcttccgtacacgttcggaggggggaccaagctggagatcacactcgaggacctgaagaacgtgttcccacctgaggtggccgtgttcgagcctagcgaggccgagatcagccacacccagaaagccaccctcgtgtgcctggctaccggcttctaccccgaccatgtggaactgtcttggtgggtcaacggcaaagaggtgcacagcggcgtgtctaccgacccccagccactgaaagaacagcccgccctgaacgacagccggtactgcctgagcagcagactgagagtgtccgccaccttctggcagaacccccggaaccacttcagatgccaggtgcagttctacggcctgagcgagaacgacgagtggacccaggacagagccaagcccgtgacccagatcgtgtctgccgaagcctggggcagagccgattgcggatcccagagcttcggcctgctggaccccaagctgtgctacctgctggatggcatcctgttcatctacggcgtgatcctgaccgccctgttcctgagagtgaagttcagcagaagcgccgacgcccctgcctaccagcagggacagaaccaactgtacaacgagctgaacctgggcagacgggaagagtacgacgtgctggacaagcggagaggcagggaccctgagatgggcggaaagccccggagaaagaacccccaggaaggactgtataacgaactccagaaagacaagatggccgaagcctacagcgagatcggcatgaagggcgagcggagaagaggcaagggccacgatggcctgtaccagggcctgagcaccgccaccaaggacacctatgacgccctgcacatgcaggccctgcctccaagaagggccaagcgatctggatctggagcaacaaacttctcactactcaaacaagcaggtgacgtggaggagaatcccgggcctactagtgccaccatggactggatttggcgcatccttttccttgtcggcgctgctaccggcgcccattccgggcccgaagtgcaactggttgaatccggtggcggcctggtgcaagcaggcggatctctcagacttagctgtgccgcctccggcagaaccttcacaatgggatggtttaggcaggctccagggaaagagagagagttcgtcgccgccatctctctgtctcccacactggcctactacgccgactctgtgaaaggccggttcaccatctccagagataatgccaagaacaccgtggtgctgcaaatgaactctctgaaacccgaggatacagccctgtactattgtgccgctgaccggaagtccgtgatgagcatcagacccgattactggggacagggcacacaagtcacagtgtcctctggatccggcggcggaggatctggcggaggcggatctgggggcggaggctctttcgaagtgaaactgcaggagtcaggacctggcctggtggcgccctcacagagcctgtccgtcacatgcactgtctcaggggtctcattacccgactatggtgtaagctggattcgccagcctccacgaaagggtctggagtggctgggagtaatatggggtagtgaaaccacatactataattcagctctcaaatccagactgaccatcatcaaggacaactccaagagccaagttttcttaaaaatgaacagtctgcaaactgatgacacagccatttactactgtgccaaacattattactacggtggtagctatgctatggactactggggccaaggaacctcagtcaccgtctcctcaacgcgtatccagaaccctgatcctgccgtgtaccagctgcgggatagcaagagcagcgacaagagcgtgtgtctgttcaccgacttcgacagccagaccaacgtgtcccagagcaaggactccgacgtgtacatcaccgataagaccgtgctggacatgcggagcatggacttcaagagcaactccgccgtggcctggtccaacaagtccgatttcgcctgcgccaacgccttcaacaacagcattatccccgaggacacattcttcccaagccccgagagcagctgcggtaccatcactcaaggtttggcagtgtcaaccatctcatcattctttccacctggctaccaagtgtccttctgcctggtcatggtgctgctgttcgccgtggataccggcctgtacttcagcgtcaagaccaacatccggtccagcaccagagactggaaggaccacaagttcaagtggcggaaggaccctcaggacaagcgcgccaagagaagcggatctggcgtgaagcagaccctgaatttcgacctgctgaagctggctggcgacgtggaatccaacccaggcccttctagaatgtaccggatgcagctgctgagctgtatcgccctgtctctggccctggtcacaaatagcaactgggttaacgtgatctccgacctgaagaagatcgaggacctgatccagtccatgcacatcgacgccacactgtacaccgagagcgacgtgcaccctagctgtaaagtgaccgccatgaagtgctttctgctggaactgcaagtgatctccctggaaagcggcgacgccagcatccacgacaccgtgaagaacctgattatcctggctaacaacagcctgagcagcaacggcaacgtgaccgagtccggctgtaaagagtgcgaggaactggaagagaagaatatcaaagagttcctccagagcttcgtgcacatcgtgcagatgttcatcaacaccagcaagatcgaagtgatgtaccctcctccttacctggacaacgagaagtccaacggcaccatcatccacgtgaagggcaagcacctgtgtccttctccactgttccccggacctagcaagcctttctgggtgctcgttgttgttggcggcgtgctggcctgttacagcctgctggttaccgtggccttcatcatcttttgggtccgaagcaagcggagctaa

SEQ ID NO: 8736 - DNA, 3573 bp, synthetic construct
  misc_feature 772: note = n is a, c, g, or t
  source 1..3573: mol_type = other DNA
atggccttaccagtgaccgccttgctcctgccgctggccttgctgctccacgccgccaggccggacatccagatgacacagactacatcctccctgtctgcctctctgggagacagagtcaccatcagttgcagggcaagtcaggacattagtaagtacctgaactggtatcagcagaaaccagatggaactgttaaactcctgatctaccatacatcaagattacactcaggagtcccatcaaggttcagtggcagtgggtctggaacagattattctctcaccattagcaacctggagcaagaagatattgccacttacttttgccaacagggtaatacgcttccgtacacgttcggaggggggaccaagctggagatcacactcgaggacctgaagaacgtgttcccacctgaggtggccgtgttcgagcctagcgaggccgagatcagccacacccagaaagccaccctcgtgtgcctggctaccggcttctaccccgaccatgtggaactgtcttggtgggtcaacggcaaagaggtgcacagcggcgtgtctaccgacccccagccactgaaagaacagcccgccctgaacgacagccggtactgcctgagcagcagactgagagtgtccgccaccttctggcagaacccccggaaccacttcagatgccaggtgcagttctacggcctgagcgagaacgacgagtggacccaggacagagccaagcccgtgacccagatcgtgtctgccgaagcctggggcaganccgattgcggatcccagagcttcggcctgctggaccccaagctgtgctacctgctggatggcatcctgttcatctacggcgtgatcctgaccgccctgttcctgagagtgaagttcagcagaagcgccgacgcccctgcctaccagcagggacagaaccaactgtacaacgagctgaacctgggcagacgggaagagtacgacgtgctggacaagcggagaggcagggaccctgagatgggcggaaagccccggagaaagaacccccaggaaggactgtataacgaactccagaaagacaagatggccgaagcctacagcgagatcggcatgaagggcgagcggagaagaggcaagggccacgatggcctgtaccagggcctgagcaccgccaccaaggacacctatgacgccctgcacatgcaggccctgcctccaagaagggccaagcgatctggatctggagcaacaaacttctcactactcaaacaagcaggtgacgtggaggagaatcccgggcctactagtgccaccatggactggatttggcgcatccttttccttgtcggcgctgctaccggcgcccattccgggcccgaagtgcagctggttgaatctggcggaggactggttcaggctggcggatctctgagactgtcttgtgccgccagcggcagaacctttagcatgggctggtttagacaggcccctggcaaagagagagagttcgtcgccgccatcacatactctggcggcagcccttactacgccgactctgtgaagggcagattcaccatcagccgggacaacgccaagaacaccgtgtacctccagatgaacagcctgaagcctgaggacaccgccgtgtactactgcgccgccaatccaacatacggcagcgactggaacgccgagaattggggccagggaacccaagtgacagtgtctagcggatccggcggcggaggatctggcggaggcggatctgggggcggaggctctttcgaagtgaaactgcaggagtcaggacctggcctggtggcgccctcacagagcctgtccgtcacatgcactgtctcaggggtctcattacccgactatggtgtaagctggattcgccagcctccacgaaagggtctggagtggctgggagtaatatggggtagtgaaaccacatactataattcagctctcaaatccagactgaccatcatcaaggacaactccaagagccaagttttcttaaaaatgaacagtctgcaaactgatgacacagccatttactactgtgccaaacattattactacggtggtagctatgctatggactactggggccaaggaacctcagtcaccgtctcctcaacgcgtatccagaaccctgatcctgccgtgtaccagctgcgggatagcaagagcagcgacaagagcgtgtgtctgttcaccgacttcgacagccagaccaacgtgtcccagagcaaggactccgacgtgtacatcaccgataagaccgtgctggacatgcggagcatggacttcaagagcaactccgccgtggcctggtccaacaagtccgatttcgcctgcgccaacgccttcaacaacagcattatccccgaggacacattcttcccaagccccgagagcagctgcggtacccagagttttgggttgttggaccctaaattgtgctatctgttggacggaatcctgttcatttacggagtgatcctgaccgcattgttcctgcgggttaagttttccagatccgcagacgcacccgcttaccaacaagggcagaaccaactctacaatgaacttaatttggggcggagggaagagtacgacgttctggacaaaaggaggggacgagatcccgagatgggcggaaagcctcgaaggaagaatccgcaagaggggctttataacgaactccagaaagataaaatggcagaagcctatagtgagattgggatgaagggagaaaggaggaggggtaaaggtcacgatgggttgtaccaaggattgagcacagccactaaagatacctatgatgcgctccacatgcaggccctgccgccaagacgcgccaagagaagcggatctggcgtgaagcagaccctgaatttcgacctgctgaagctggctggcgacgtggaatccaacccaggcccttctagaatgtaccggatgcagctgctgagctgtatcgccctgtctctggccctggtcacaaatagcaactgggttaacgtgatctccgacctgaagaagatcgaggacctgatccagtccatgcacatcgacgccacactgtacaccgagagcgacgtgcaccctagctgtaaagtgaccgccatgaagtgctttctgctggaactgcaagtgatctccctggaaagcggcgacgccagcatccacgacaccgtgaagaacctgattatcctggctaacaacagcctgagcagcaacggcaacgtgaccgagtccggctgtaaagagtgcgaggaactggaagagaagaatatcaaagagttcctccagagcttcgtgcacatcgtgcagatgttcatcaacaccagcaagatcgaagtgatgtaccctcctccttacctggacaacgagaagtccaacggcaccatcatccacgtgaagggcaagcacctgtgtccttctccactgttccccggacctagcaagcctttctgggtgctcgttgttgttggcggcgtgctggcctgttacagcctgctggttaccgtggccttcatcatcttttgggtccgaagcaagcggagctaa

SEQ ID NO: 8737 - DNA, 3573 bp, synthetic construct
  source 1..3573: mol_type = other DNA
atggccttaccagtgaccgccttgctcctgccgctggccttgctgctccacgccgccaggccggacatccagatgacacagactacatcctccctgtctgcctctctgggagacagagtcaccatcagttgcagggcaagtcaggacattagtaagtacctgaactggtatcagcagaaaccagatggaactgttaaactcctgatctaccatacatcaagattacactcaggagtcccatcaaggttcagtggcagtgggtctggaacagattattctctcaccattagcaacctggagcaagaagatattgccacttacttttgccaacagggtaatacgcttccgtacacgttcggaggggggaccaagctggagatcacactcgaggacctgaagaacgtgttcccacctgaggtggccgtgttcgagcctagcgaggccgagatcagccacacccagaaagccaccctcgtgtgcctggctaccggcttctaccccgaccatgtggaactgtcttggtgggtcaacggcaaagaggtgcacagcggcgtgtctaccgacccccagccactgaaagaacagcccgccctgaacgacagccggtactgcctgagcagcagactgagagtgtccgccaccttctggcagaacccccggaaccacttcagatgccaggtgcagttctacggcctgagcgagaacgacgagtggacccaggacagagccaagcccgtgacccagatcgtgtctgccgaagcctggggcagagccgattgcggatcccagagcttcggcctgctggaccccaagctgtgctacctgctggatggcatcctgttcatctacggcgtgatcctgaccgccctgttcctgagagtgaagttcagcagaagcgccgacgcccctgcctaccagcagggacagaaccaactgtacaacgagctgaacctgggcagacgggaagagtacgacgtgctggacaagcggagaggcagggaccctgagatgggcggaaagccccggagaaagaacccccaggaaggactgtataacgaactccagaaagacaagatggccgaagcctacagcgagatcggcatgaagggcgagcggagaagaggcaagggccacgatggcctgtaccagggcctgagcaccgccaccaaggacacctatgacgccctgcacatgcaggccctgcctccaagaagggccaagcgatctggatctggagcaacaaacttctcactactcaaacaagcaggtgacgtggaggagaatcccgggcctactagtgccaccatggactggatttggcgcatccttttccttgtcggcgctgctaccggcgcccattccgggccccagctccagctgcaagagtctggacctggcctggtcaagcctagcgagacactgagcctgacctgtaccgtgtccggcgatagcatcagcagcggcgattactactggggctggatcagacagcctcctggcaaaggactggaatggatcggccacatctactacaacggcatcagctactacaaccccagcctgaagtccagagtgaccatcagcgtggacaccagccggaaccagttctccctgaagctgtctagcgtgacagccgccgataccgccgtgtactactgcaccagagaggacagcagcaactggcggagtagaggccagggaacactggtcacagttagctctggatccggcggcggaggatctggcggaggcggatctgggggcggaggctctttcgaagtgaaactgcaggagtcaggacctggcctggtggcgccctcacagagcctgtccgtcacatgcactgtctcaggggtctcattacccgactatggtgtaagctggattcgccagcctccacgaaagggtctggagtggctgggagtaatatggggtagtgaaaccacatactataattcagctctcaaatccagactgaccatcatcaaggacaactccaagagccaagttttcttaaaaatgaacagtctgcaaactgatgacacagccatttactactgtgccaaacattattactacggtggtagctatgctatggactactggggccaaggaacctcagtcaccgtctcctcaacgcgtatccagaaccctgatcctgccgtgtaccagctgcgggatagcaagagcagcgacaagagcgtgtgtctgttcaccgacttcgacagccagaccaacgtgtcccagagcaaggactccgacgtgtacatcaccgataagaccgtgctggacatgcggagcatggacttcaagagcaactccgccgtggcctggtccaacaagtccgatttcgcctgcgccaacgccttcaacaacagcattatccccgaggacacattcttcccaagccccgagagcagctgcggtacccagagttttgggttgttggaccctaaattgtgctatctgttggacggaatcctgttcatttacggagtgatcctgaccgcattgttcctgcgggttaagttttccagatccgcagacgcacccgcttaccaacaagggcagaaccaactctacaatgaacttaatttggggcggagggaagagtacgacgttctggacaaaaggaggggacgagatcccgagatgggcggaaagcctcgaaggaagaatccgcaagaggggctttataacgaactccagaaagataaaatggcagaagcctatagtgagattgggatgaagggagaaaggaggaggggtaaaggtcacgatgggttgtaccaaggattgagcacagccactaaagatacctatgatgcgctccacatgcaggccctgccgccaagacgcgccaagagaagcggatctggcgtgaagcagaccctgaatttcgacctgctgaagctggctggcgacgtggaatccaacccaggcccttctagaatgtaccggatgcagctgctgagctgtatcgccctgtctctggccctggtcacaaatagcaactgggttaacgtgatctccgacctgaagaagatcgaggacctgatccagtccatgcacatcgacgccacactgtacaccgagagcgacgtgcaccctagctgtaaagtgaccgccatgaagtgctttctgctggaactgcaagtgatctccctggaaagcggcgacgccagcatccacgacaccgtgaagaacctgattatcctggctaacaacagcctgagcagcaacggcaacgtgaccgagtccggctgtaaagagtgcgaggaactggaagagaagaatatcaaagagttcctccagagcttcgtgcacatcgtgcagatgttcatcaacaccagcaagatcgaagtgatgtaccctcctccttacctggacaacgagaagtccaacggcaccatcatccacgtgaagggcaagcacctgtgtccttctccactgttccccggacctagcaagcctttctgggtgctcgttgttgttggcggcgtgctggcctgttacagcctgctggttaccgtggccttcatcatcttttgggtccgaagcaagcggagctaa

SEQ ID NO: 8738 - DNA, 3573 bp, synthetic construct
  source 1..3573: mol_type = other DNA
atggccttaccagtgaccgccttgctcctgccgctggccttgctgctccacgccgccaggccggacatccagatgacacagactacatcctccctgtctgcctctctgggagacagagtcaccatcagttgcagggcaagtcaggacattagtaagtacctgaactggtatcagcagaaaccagatggaactgttaaactcctgatctaccatacatcaagattacactcaggagtcccatcaaggttcagtggcagtgggtctggaacagattattctctcaccattagcaacctggagcaagaagatattgccacttacttttgccaacagggtaatacgcttccgtacacgttcggaggggggaccaagctggagatcacactcgaggacctgaagaacgtgttcccacctgaggtggccgtgttcgagcctagcgaggccgagatcagccacacccagaaagccaccctcgtgtgcctggctaccggcttctaccccgaccatgtggaactgtcttggtgggtcaacggcaaagaggtgcacagcggcgtgtctaccgacccccagccactgaaagaacagcccgccctgaacgacagccggtactgcctgagcagcagactgagagtgtccgccaccttctggcagaacccccggaaccacttcagatgccaggtgcagttctacggcctgagcgagaacgacgagtggacccaggacagagccaagcccgtgacccagatcgtgtctgccgaagcctggggcagagccgattgcggatcccagagcttcggcctgctggaccccaagctgtgctacctgctggatggcatcctgttcatctacggcgtgatcctgaccgccctgttcctgagagtgaagttcagcagaagcgccgacgcccctgcctaccagcagggacagaaccaactgtacaacgagctgaacctgggcagacgggaagagtacgacgtgctggacaagcggagaggcagggaccctgagatgggcggaaagccccggagaaagaacccccaggaaggactgtataacgaactccagaaagacaagatggccgaagcctacagcgagatcggcatgaagggcgagcggagaagaggcaagggccacgatggcctgtaccagggcctgagcaccgccaccaaggacacctatgacgccctgcacatgcaggccctgcctccaagaagggccaagcgatctggatctggagcaacaaacttctcactactcaaacaagcaggtgacgtggaggagaatcccgggcctactagtgccaccatggactggatttggcgcatccttttccttgtcggcgctgctaccggcgcccattccgggcccgaagtgcaactggttgaatccggtggcggcctggtgcaagcaggcggatctctcagacttagctgtgccgcctccggcagaaccttcacaatgggatggtttaggcaggctccagggaaagagagagagttcgtcgccgccatctctctgtctcccacactggcctactacgccgactctgtgaaaggccggttcaccatctccagagataatgccaagaacaccgtggtgctgcaaatgaactctctgaaacccgaggatacagccctgtactattgtgccgctgaccggaagtccgtgatgagcatcagacccgattactggggacagggcacacaagtcacagtgtcctctggatccggcggcggaggatctggcggaggcggatctgggggcggaggctctttcgaagtgaaactgcaggagtcaggacctggcctggtggcgccctcacagagcctgtccgtcacatgcactgtctcaggggtctcattacccgactatggtgtaagctggattcgccagcctccacgaaagggtctggagtggctgggagtaatatggggtagtgaaaccacatactataattcagctctcaaatccagactgaccatcatcaaggacaactccaagagccaagttttcttaaaaatgaacagtctgcaaactgatgacacagccatttactactgtgccaaacattattactacggtggtagctatgctatggactactggggccaaggaacctcagtcaccgtctcctcaacgcgtatccagaaccctgatcctgccgtgtaccagctgcgggatagcaagagcagcgacaagagcgtgtgtctgttcaccgacttcgacagccagaccaacgtgtcccagagcaaggactccgacgtgtacatcaccgataagaccgtgctggacatgcggagcatggacttcaagagcaactccgccgtggcctggtccaacaagtccgatttcgcctgcgccaacgccttcaacaacagcattatccccgaggacacattcttcccaagccccgagagcagctgcggtacccagagttttgggttgttggaccctaaattgtgctatctgttggacggaatcctgttcatttacggagtgatcctgaccgcattgttcctgcgggttaagttttccagatccgcagacgcacccgcttaccaacaagggcagaaccaactctacaatgaacttaatttggggcggagggaagagtacgacgttctggacaaaaggaggggacgagatcccgagatgggcggaaagcctcgaaggaagaatccgcaagaggggctttataacgaactccagaaagataaaatggcagaagcctatagtgagattgggatgaagggagaaaggaggaggggtaaaggtcacgatgggttgtaccaaggattgagcacagccactaaagatacctatgatgcgctccacatgcaggccctgccgccaagacgcgccaagagaagcggatctggcgtgaagcagaccctgaatttcgacctgctgaagctggctggcgacgtggaatccaacccaggcccttctagaatgtaccggatgcagctgctgagctgtatcgccctgtctctggccctggtcacaaatagcaactgggttaacgtgatctccgacctgaagaagatcgaggacctgatccagtccatgcacatcgacgccacactgtacaccgagagcgacgtgcaccctagctgtaaagtgaccgccatgaagtgctttctgctggaactgcaagtgatctccctggaaagcggcgacgccagcatccacgacaccgtgaagaacctgattatcctggctaacaacagcctgagcagcaacggcaacgtgaccgagtccggctgtaaagagtgcgaggaactggaagagaagaatatcaaagagttcctccagagcttcgtgcacatcgtgcagatgttcatcaacaccagcaagatcgaagtgatgtaccctcctccttacctggacaacgagaagtccaacggcaccatcatccacgtgaagggcaagcacctgtgtccttctccactgttccccggacctagcaagcctttctgggtgctcgttgttgttggcggcgtgctggcctgttacagcctgctggttaccgtggccttcatcatcttttgggtccgaagcaagcggagctaa

SEQ ID NO: 8739 - DNA, 2976 bp, synthetic construct
  source 1..2976: mol_type = other DNA
atggccttaccagtgaccgccttgctcctgccgctggccttgctgctccacgccgccaggccgagctacgtgctgacacagcctccatccgtgtctgtggctccaggacagaccgccagaatcacatgcggcggcaacaacatcggcagcaagagcgtgcactggtatcagcagccacctggacaggctccagtggtggtggtgtacgacgacagcgatagacctagcggcatccccgagagattcagcggcagcaattccggcaataccgccacactgaccatcagcagagtggaagctggcgacgaggccgtgtactactgccaagtgtgggacagcagcagcgatcacgtggtgtttggcggcggaacaaagctgacagtgcttctcgaggacctgaagaacgtgttcccacctgaggtggccgtgttcgagcctagcgaggccgagatcagccacacccagaaagccaccctcgtgtgcctggctaccggcttctaccccgaccatgtggaactgtcttggtgggtcaacggcaaagaggtgcacagcggcgtgtctaccgacccccagccactgaaagaacagcccgccctgaacgacagccggtactgcctgagcagcagactgagagtgtccgccaccttctggcagaacccccggaaccacttcagatgccaggtgcagttctacggcctgagcgagaacgacgagtggacccaggacagagccaagcccgtgacccagatcgtgtctgccgaagcctggggcagagccgattgcggatcccagagcttcggcctgctggaccccaagctgtgctacctgctggatggcatcctgttcatctacggcgtgatcctgaccgccctgttcctgagagtgaagttcagcagaagcgccgacgcccctgcctaccagcagggacagaaccaactgtacaacgagctgaacctgggcagacgggaagagtacgacgtgctggacaagcggagaggcagggaccctgagatgggcggaaagccccggagaaagaacccccaggaaggactgtataacgaactccagaaagacaagatggccgaagcctacagcgagatcggcatgaagggcgagcggagaagaggcaagggccacgatggcctgtaccagggcctgagcaccgccaccaaggacacctatgacgccctgcacatgcaggccctgcctccaagaagggccaagcgatctggatctggagcaacaaacttctcactactcaaacaagcaggtgacgtggaggagaatcccgggcctactagtgccaccatggactggatttggcgcatccttttccttgtcggcgctgctaccggcgcccattccgccagaagcgaggacagatacagaaaccccaaattcgaacaactccagctgcaagagtctggccctggcctggtcaagcctagcgaaacactgagcctgacctgtaccgtgtctggcggctctatcagctccggcagctatttctggggctggatcagacaacctcctggcaaaggactggaatggatcggctccatctactacagcggcatcacctactacaaccccagcctgaagtccagagtgaccatctccgtggacaccagcaagaaccagttctccctgaagctgagcagcgtgacagccgccgataccgccgtgtattattgtgccagacatgacggcgctgtggccggcctgtttgattattggggacagggcaccctggtcaccgtgtcatctgctacgcgtatccagaaccctgatcctgccgtgtaccagctgcgggatagcaagagcagcgacaagagcgtgtgtctgttcaccgacttcgacagccagaccaacgtgtcccagagcaaggactccgacgtgtacatcaccgataagaccgtgctggacatgcggagcatggacttcaagagcaactccgccgtggcctggtccaacaagtccgatttcgcctgcgccaacgccttcaacaacagcattatccccgaggacacattcttcccaagccccgagagcagctgcggtaccatcactcaaggtttggcagtgtcaaccatctcatcattctttccacctggctaccaagtgtccttctgcctggtcatggtgctgctgttcgccgtggataccggcctgtacttcagcgtcaagaccaacatccggtccagcaccagagactggaaggaccacaagttcaagtggcggaaggaccctcaggacaagcgcgccaagagaagcggatctggcgtgaagcagaccctgaatttcgacctgctgaagctggctggcgacgtggaatccaacccaggcccttctagaatgtaccggatgcagctgctgagctgtatcgccctgtctctggccctggtcacaaatagcaactgggttaacgtgatctccgacctgaagaagatcgaggacctgatccagtccatgcacatcgacgccacactgtacaccgagagcgacgtgcaccctagctgtaaagtgaccgccatgaagtgctttctgctggaactgcaagtgatctccctggaaagcggcgacgccagcatccacgacaccgtgaagaacctgattatcctggctaacaacagcctgagcagcaacggcaacgtgaccgagtccggctgtaaagagtgcgaggaactggaagagaagaatatcaaagagttcctccagagcttcgtgcacatcgtgcagatgttcatcaacaccagcaagatcgaagtgatgtaccctcctccttacctggacaacgagaagtccaacggcaccatcatccacgtgaagggcaagcacctgtgtccttctccactgttccccggacctagcaagcctttctgggtgctcgttgttgttggcggcgtgctggcctgttacagcctgctggttaccgtggccttcatcatcttttgggtccgaagcaagcggagctaa

SEQ ID NO: 8740 - DNA, 2448 bp, synthetic construct
  source 1..2448: mol_type = other DNA
atggccttaccagtgaccgccttgctcctgccgctggccttgctgctccacgccgccaggccggacgagatcgtgctgacacagagccctgccaccctgtctctgagccctggcgaaagagccaccctgagctgtagagccagccagagcgtgtccagctacctggcctggtatcagcagaagcccggccaggctccccggctgctgatctacgatgccagcaatagagccaccggcatccccgccagattttccggctctggcagcggcaccgacttcaccctgaccatcagctccctggaacccgaggacttcgccgtgtactactgccagcagcggagcaactggcccatcacattcggccagggcacccggctggaaatcaaactcgagacagtggccgccccatctgtattcatctttcctccatctgatgaacagcttaagtccggcactgcttctgttgtttgcctgcttaacaatttttacccgcgggaagccaaggtgcaatggaaagtggacaacgccctgcagtctggtaacagtcaggaaagcgtgactgaacaggacagcaaagactccacatactccttgagttccaccttgacgctcagtaaggcagactacgagaagcacaaggtttatgcctgtgaagtgactcaccagggcctctctagcccagtgactaagtccttcaaccgcggggagtgtaggaagcgacgggggtcaggcgccactaacttctctctgctgaaacaagccggggacgtggaggagaatccaggtcccactagtatggactggatttggcgcatccttttccttgtcggcgctgctaccggcgcgcattccttcgaagaagtgcagctggtggaatcaggcggcggactggtgcagcctggcagaagcctgagactgagctgtgccgccagcggcttcaccttcaacgactacgccatgcactgggtgcgccaggcccctggaaaaggactggaatgggtgtccacaatcagctggaacagcggcagcatcggctacgccgatagcgtgaagggccggttcaccatcagccgggacaacgccaagaagtccctgtacctccagatgaacagcctgcgggccgaggacacagccctgtactattgcgccaaggacatccagtacggcaactactactacggcatggacgtgtggggccagggaaccaccgtgaccgtgtcatctacgcgtgcctctacaaagggaccctccgtgtttcctctggctccctgtagcagaagcaccagcgaatctacagccgctctgggctgcctggtcaaggactactttcctgagcctgtgaccgtgtcctggaacagcggagcactgacatctggcgtgcacacctttccagccgtgctccaaagcagcggcctgtactctctgagcagcgtggtcacagtgcctagctctagcctgggcaccaagacctacacctgtaatgtggaccacaagcctagcaacaccaaggtggacaagcgcgtggaatctaagtacggccctccttgtcctccatgtcctggtaccatccccgaggacacattcttcccaagccccgagagcagctgcgacgtgaagctggtggaaaagagcttcgagacagacaccaacctgaacttccagaacctgagcgtgatcggcttcagaatcctgctgctgaaagtggccggctttaacctgctgatgaccctgcggctgtggtccagccgcgccaagagaagcggatctggcgtgaagcagaccctgaatttcgacctgctgaagctggctggcgacgtggaatccaacccaggcccttctagaggccatatgaccgagtacaagcccacggtgcgcctcgccacccgcgacgacgtccccagggccgtacgcaccctcgccgccgcgttcgccgactaccccgccacgcgccacaccgtcgatccggaccgccacatcgagcgggtcaccgagctgcaagaactcttcctcacgcgcgtcgggctcgacatcggcaaggtgtgggtcgcggacgacggcgccgcggtggcggtctggaccacgccggagagcgtcgaagcgggggcggtgttcgccgagatcggcccgcgcatggccgagttgagcggttcccggctggccgcgcagcaacagatggaaggcctcctggcgccgcaccggcccaaggagcccgcgtggttcctggccaccgtcggcgtctcgcccgaccaccagggcaagggtctgggcagcgccgtcgtgctccccggagtggaggcggccgagcgcgccggggtgcccgccttcctggagacctccgcgccccgcaacctccccttctacgagcggctcggcttcaccgtcaccgccgacgtcgaggtgcccgaaggaccgcgcacctggtgcatgacccgcaagcccggtgcctga

SEQ ID NO: 8741 - DNA, 2451 bp, synthetic construct
  source 1..2451: mol_type = other DNA
atggccttaccagtgaccgccttgctcctgccgctggccttgctgctccacgccgccaggccggagatcgtgctgacacagtctcccgccacactgtcactgtctccaggcgaaagagccacactgagctgtagagccagccagagcgtgtcctcttacctggcctggtatcagcagaagcctggacaggctccccggctgctgatctacgatgccagcaatagagccacaggcatccccgccagattttctggctctggcagcggcaccgatttcaccctgaccataagcagcctggaacctgaggacttcgccgtgtactactgccagcagagaagcaactggcccctgacctttggacagggcaccaaggtggaaatcaaactcgagacagtggccgccccatctgtattcatctttcctccatctgatgaacagcttaagtccggcactgcttctgttgtttgcctgcttaacaatttttacccgcgggaagccaaggtgcaatggaaagtggacaacgccctgcagtctggtaacagtcaggaaagcgtgactgaacaggacagcaaagactccacatactccttgagttccaccttgacgctcagtaaggcagactacgagaagcacaaggtttatgcctgtgaagtgactcaccagggcctctctagcccagtgactaagtccttcaaccgcggggagtgtaggaagcgacgggggtcaggcgccactaacttctctctgctgaaacaagccggggacgtggaggagaatccaggtcccactagtatggactggatttggcgcatccttttccttgtcggcgctgctaccggcgcgcattccttcgaagtgcaactggttcaatcaggtggcggcctggttcaccctggcggatctctgagactgtcttgtaccggcagcggcttcaccttcagctaccacgccatgcactgggtccgacaggcacctggaaaaggactggaatgggtgtccatcatcggcacaggcggcgtgacctactacgccgattctgtgaagggcagattcaccatcagccgggacaacgtgaagaacagcctgtacctccagatgaactccctgagagccgaggatatggccgtgtattattgcgccagagactactacggcgctggcagcttttacgacggcctgtacggaatggatgtgtggggccagggaaccaccgtgactgtctcttctacgcgtgcctctacaaagggaccctccgtgtttcctctggctccctgtagcagaagcaccagcgaatctacagccgctctgggctgcctggtcaaggactactttcctgagcctgtgaccgtgtcctggaacagcggagcactgacatctggcgtgcacacctttccagccgtgctccaaagcagcggcctgtactctctgagcagcgtggtcacagtgcctagctctagcctgggcaccaagacctacacctgtaatgtggaccacaagcctagcaacaccaaggtggacaagcgcgtggaatctaagtacggccctccttgtcctccatgtcctggtaccatccccgaggacacattcttcccaagccccgagagcagctgcgacgtgaagctggtggaaaagagcttcgagacagacaccaacctgaacttccagaacctgagcgtgatcggcttcagaatcctgctgctgaaagtggccggctttaacctgctgatgaccctgcggctgtggtccagccgcgccaagagaagcggatctggcgtgaagcagaccctgaatttcgacctgctgaagctggctggcgacgtggaatccaacccaggcccttctagaggccatatgaccgagtacaagcccacggtgcgcctcgccacccgcgacgacgtccccagggccgtacgcaccctcgccgccgcgttcgccgactaccccgccacgcgccacaccgtcgatccggaccgccacatcgagcgggtcaccgagctgcaagaactcttcctcacgcgcgtcgggctcgacatcggcaaggtgtgggtcgcggacgacggcgccgcggtggcggtctggaccacgccggagagcgtcgaagcgggggcggtgttcgccgagatcggcccgcgcatggccgagttgagcggttcccggctggccgcgcagcaacagatggaaggcctcctggcgccgcaccggcccaaggagcccgcgtggttcctggccaccgtcggcgtctcgcccgaccaccagggcaagggtctgggcagcgccgtcgtgctccccggagtggaggcggccgagcgcgccggggtgcccgccttcctggagacctccgcgccccgcaacctccccttctacgagcggctcggcttcaccgtcaccgccgacgtcgaggtgcccgaaggaccgcgcacctggtgcatgacccgcaagcccggtgcctga

SEQ ID NO: 8742 - DNA, 2451 bp, synthetic construct
  source 1..2451: mol_type = other DNA
atggccttaccagtgaccgccttgctcctgccgctggccttgctgctccacgccgccaggccggagatcgtgctgacacagagccctgccaccctgtctctgagccctggcgaaagagccaccctgagctgtagagccagccagagcgtgcggagctacctggcctggtatcagcagaagcctggacaggcccccagactgctgatctacgacgccagcaatcgggccacaggcatccccgccagattttctggctctggcagcggcaccgacttcaccctgacaatcagcagcctggaacccgaggacttcgccgtgtactactgccagcagcggagcaactggccccctacctttggacagggcaccaaggtggaaatcaagctcgagacagtggccgccccatctgtattcatctttcctccatctgatgaacagcttaagtccggcactgcttctgttgtttgcctgcttaacaatttttacccgcgggaagccaaggtgcaatggaaagtggacaacgccctgcagtctggtaacagtcaggaaagcgtgactgaacaggacagcaaagactccacatactccttgagttccaccttgacgctcagtaaggcagactacgagaagcacaaggtttatgcctgtgaagtgactcaccagggcctctctagcccagtgactaagtccttcaaccgcggggagtgtaggaagcgacgggggtcaggcgccactaacttctctctgctgaaacaagccggggacgtggaggagaatccaggtcccactagtatggactggatttggcgcatccttttccttgtcggcgctgctaccggcgcgcattccttcgaagtgcaactggttcaatcaggtggcggcctggttcaccctggcggatctctgagactgtcttgtaccggcagcggcttcaccttcagctaccacgccatgcactgggtccgacaggcacctggaaaaggactggaatgggtgtccatcatcggcacaggcggcgtgacctactacgccgattctgtgaagggcagattcaccatcagccgggacaacgtgaagaacagcctgtacctccagatgaactccctgagagccgaggatatggccgtgtattattgcgccagagactactacggcgctggcagcttttacgacggcctgtacggaatggatgtgtggggccagggaaccaccgtgactgtctcttctacgcgtgcctctacaaagggaccctccgtgtttcctctggctccctgtagcagaagcaccagcgaatctacagccgctctgggctgcctggtcaaggactactttcctgagcctgtgaccgtgtcctggaacagcggagcactgacatctggcgtgcacacctttccagccgtgctccaaagcagcggcctgtactctctgagcagcgtggtcacagtgcctagctctagcctgggcaccaagacctacacctgtaatgtggaccacaagcctagcaacaccaaggtggacaagcgcgtggaatctaagtacggccctccttgtcctccatgtcctggtaccatccccgaggacacattcttcccaagccccgagagcagctgcgacgtgaagctggtggaaaagagcttcgagacagacaccaacctgaacttccagaacctgagcgtgatcggcttcagaatcctgctgctgaaagtggccggctttaacctgctgatgaccctgcggctgtggtccagccgcgccaagagaagcggatctggcgtgaagcagaccctgaatttcgacctgctgaagctggctggcgacgtggaatccaacccaggcccttctagaggccatatgaccgagtacaagcccacggtgcgcctcgccacccgcgacgacgtccccagggccgtacgcaccctcgccgccgcgttcgccgactaccccgccacgcgccacaccgtcgatccggaccgccacatcgagcgggtcaccgagctgcaagaactcttcctcacgcgcgtcgggctcgacatcggcaaggtgtgggtcgcggacgacggcgccgcggtggcggtctggaccacgccggagagcgtcgaagcgggggcggtgttcgccgagatcggcccgcgcatggccgagttgagcggttcccggctggccgcgcagcaacagatggaaggcctcctggcgccgcaccggcccaaggagcccgcgtggttcctggccaccgtcggcgtctcgcccgaccaccagggcaagggtctgggcagcgccgtcgtgctccccggagtggaggcggccgagcgcgccggggtgcccgccttcctggagacctccgcgccccgcaacctccccttctacgagcggctcggcttcaccgtcaccgccgacgtcgaggtgcccgaaggaccgcgcacctggtgcatgacccgcaagcccggtgcctga

SEQ ID NO: 8743 - DNA, 2433 bp, synthetic construct
  source 1..2433: mol_type = other DNA
atggccttaccagtgaccgccttgctcctgccgctggccttgctgctccacgccgccaggccggagatcgtgctgacacagagccctggcacactgtcactgtctccaggcgaaagagccacactgagctgtagagccagccagagcgtgtccagctcttacctggcttggtatcagcagaagcccggacaggctcccagactgctgatctacggtgcctctagcagagccacaggcatccccgatagattttctggcagcggctccggcaccgacttcaccctgacaatcagcagactggaacccgaggacttcgccgtgtactactgccagcagtaccaccactctccactgacctttggcggaggcaccaaggtggaaatcaagagactcgagacagtggccgccccatctgtattcatctttcctccatctgatgaacagcttaagtccggcactgcttctgttgtttgcctgcttaacaatttttacccgcgggaagccaaggtgcaatggaaagtggacaacgccctgcagtctggtaacagtcaggaaagcgtgactgaacaggacagcaaagactccacatactccttgagttccaccttgacgctcagtaaggcagactacgagaagcacaaggtttatgcctgtgaagtgactcaccagggcctctctagcccagtgactaagtccttcaaccgcggggagtgtaggaagcgacgggggtcaggcgccactaacttctctctgctgaaacaagccggggacgtggaggagaatccaggtcccactagtatggactggatttggcgcatccttttccttgtcggcgctgctaccggcgcgcattccttcgaagttcagctggttgaatcaggtggcggcctggttcaacctggcggatctctgagactgtcttgtgccgccagcggcttcactttcagcggcagatccatgaactgggtccgacaggcccctggcaaaggactggaatgggtgtcctacatcagcagcgacagccggaccatctactacgccgatagcgtgaagggcagattcaccatctccagagacaacgccaagaacagcctgtacctccagatgaactccctgagagccgaggacacagccgtgtattattgtgccagaggcggccacggctacttcgatctttggggcagaggcaccctggtcaccgtttcttctacgcgtgcctctacaaagggaccctccgtgtttcctctggctccctgtagcagaagcaccagcgaatctacagccgctctgggctgcctggtcaaggactactttcctgagcctgtgaccgtgtcctggaacagcggagcactgacatctggcgtgcacacctttccagccgtgctccaaagcagcggcctgtactctctgagcagcgtggtcacagtgcctagctctagcctgggcaccaagacctacacctgtaatgtggaccacaagcctagcaacaccaaggtggacaagcgcgtggaatctaagtacggccctccttgtcctccatgtcctggtaccatccccgaggacacattcttcccaagccccgagagcagctgcgacgtgaagctggtggaaaagagcttcgagacagacaccaacctgaacttccagaacctgagcgtgatcggcttcagaatcctgctgctgaaagtggccggctttaacctgctgatgaccctgcggctgtggtccagccgcgccaagagaagcggatctggcgtgaagcagaccctgaatttcgacctgctgaagctggctggcgacgtggaatccaacccaggcccttctagaggccatatgaccgagtacaagcccacggtgcgcctcgccacccgcgacgacgtccccagggccgtacgcaccctcgccgccgcgttcgccgactaccccgccacgcgccacaccgtcgatccggaccgccacatcgagcgggtcaccgagctgcaagaactcttcctcacgcgcgtcgggctcgacatcggcaaggtgtgggtcgcggacgacggcgccgcggtggcggtctggaccacgccggagagcgtcgaagcgggggcggtgttcgccgagatcggcccgcgcatggccgagttgagcggttcccggctggccgcgcagcaacagatggaaggcctcctggcgccgcaccggcccaaggagcccgcgtggttcctggccaccgtcggcgtctcgcccgaccaccagggcaagggtctgggcagcgccgtcgtgctccccggagtggaggcggccgagcgcgccggggtgcccgccttcctggagacctccgcgccccgcaacctccccttctacgagcggctcggcttcaccgtcaccgccgacgtcgaggtgcccgaaggaccgcgcacctggtgcatgacccgcaagcccggtgcctga

SEQ ID NO: 8744 - DNA, 2460 bp, synthetic construct
  source 1..2460: mol_type = other DNA
atggccttaccagtgaccgccttgctcctgccgctggccttgctgctccacgccgccaggccggagatcgtgctgacacagagccctggcacactgtcactgtctccaggcgaaagagccacactgagctgtagagccagccagagcgtgtccagctcttacctggcttggtatcagcagaagcccggacaggctcccagactgctgatctacggtgcctctagcagagccacaggcatccccgatagattttctggcagcggctccggcaccgacttcaccctgacaatcagcagactggaacccgaggacttcgccgtgtactactgccagcagtaccaccactctccactgacctttggcggaggcaccaaggtggaaatcaagagactcgagacagtggccgccccatctgtattcatctttcctccatctgatgaacagcttaagtccggcactgcttctgttgtttgcctgcttaacaatttttacccgcgggaagccaaggtgcaatggaaagtggacaacgccctgcagtctggtaacagtcaggaaagcgtgactgaacaggacagcaaagactccacatactccttgagttccaccttgacgctcagtaaggcagactacgagaagcacaaggtttatgcctgtgaagtgactcaccagggcctctctagcccagtgactaagtccttcaaccgcggggagtgtaggaagcgacgggggtcaggcgccactaacttctctctgctgaaacaagccggggacgtggaggagaatccaggtcccactagtatggactggatttggcgcatccttttccttgtcggcgctgctaccggcgcgcattccttcgaacaggtgcaactccaggaatctggccccggactggctaagcccagcgagacactgagcctgacctgtaccgtgtccggcgacagcatcaccagctactactggtcctggatcagacagccccctggcaagggcctggaatggatcggctacatctactacagcggcagcaccaactacaaccccagcctgaagtccagagtgaccatcagcgtggacaccagcaagaaccagttctccctgaagctgagcagcgtgacagccgccgacaccgccgtgtattattgcgccagagatcagcggagaatcgccgctgccggcacccacttttacggcatggatgtgtggggccagggcaccaccgtgaccgtgtcatctacgcgtgcctctacaaagggaccctccgtgtttcctctggctccctgtagcagaagcaccagcgaatctacagccgctctgggctgcctggtcaaggactactttcctgagcctgtgaccgtgtcctggaacagcggagcactgacatctggcgtgcacacctttccagccgtgctccaaagcagcggcctgtactctctgagcagcgtggtcacagtgcctagctctagcctgggcaccaagacctacacctgtaatgtggaccacaagcctagcaacaccaaggtggacaagcgcgtggaatctaagtacggccctccttgtcctccatgtcctggtaccatccccgaggacacattcttcccaagccccgagagcagctgcgacgtgaagctggtggaaaagagcttcgagacagacaccaacctgaacttccagaacctgagcgtgatcggcttcagaatcctgctgctgaaagtggccggctttaacctgctgatgaccctgcggctgtggtccagccgcgccaagagaagcggatctggcgtgaagcagaccctgaatttcgacctgctgaagctggctggcgacgtggaatccaacccaggcccttctagaggccatatgaccgagtacaagcccacggtgcgcctcgccacccgcgacgacgtccccagggccgtacgcaccctcgccgccgcgttcgccgactaccccgccacgcgccacaccgtcgatccggaccgccacatcgagcgggtcaccgagctgcaagaactcttcctcacgcgcgtcgggctcgacatcggcaaggtgtgggtcgcggacgacggcgccgcggtggcggtctggaccacgccggagagcgtcgaagcgggggcggtgttcgccgagatcggcccgcgcatggccgagttgagcggttcccggctggccgcgcagcaacagatggaaggcctcctggcgccgcaccggcccaaggagcccgcgtggttcctggccaccgtcggcgtctcgcccgaccaccagggcaagggtctgggcagcgccgtcgtgctccccggagtggaggcggccgagcgcgccggggtgcccgccttcctggagacctccgcgccccgcaacctccccttctacgagcggctcggcttcaccgtcaccgccgacgtcgaggtgcccgaaggaccgcgcacctggtgcatgacccgcaagcccggtgcctga

SEQ ID NO: 8745 - DNA, 2433 bp, synthetic construct
  source 1..2433: mol_type = other DNA
atggccttaccagtgaccgccttgctcctgccgctggccttgctgctccacgccgccaggccggagatcgtgctgacacagagccctggcaccctgagcctgtctccaggcgaaagagccacactgagctgtcgggccagccagagcgtgtccagctcttacctggcctggtatcagcagaagcccggccaggctccccggctgctgatctatggcgcttctagcagagccaccggcatccccgatagattcagcggctctggcagcggcaccgacttcaccctgaccatcagcagactggaacccgaggacttcgccgtgtactactgccagcagtacggcagcagcccctggacctttggacagggcaccaaggtggaaatcaagagactcgagacagtggccgccccatctgtattcatctttcctccatctgatgaacagcttaagtccggcactgcttctgttgtttgcctgcttaacaatttttacccgcgggaagccaaggtgcaatggaaagtggacaacgccctgcagtctggtaacagtcaggaaagcgtgactgaacaggacagcaaagactccacatactccttgagttccaccttgacgctcagtaaggcagactacgagaagcacaaggtttatgcctgtgaagtgactcaccagggcctctctagcccagtgactaagtccttcaaccgcggggagtgtaggaagcgacgggggtcaggcgccactaacttctctctgctgaaacaagccggggacgtggaggagaatccaggtcccactagtatggactggatttggcgcatccttttccttgtcggcgctgctaccggcgcgcattccttcgaagttcagctggttgaatcaggtggcggcctggttcaacctggcggatctctgagactgtcttgtgccgccagcggcttcactttcagcggcagatccatgaactgggtccgacaggcccctggcaaaggactggaatgggtgtcctacatcagcagcgacagccggaccatctactacgccgatagcgtgaagggcagattcaccatctccagagacaacgccaagaacagcctgtacctccagatgaactccctgagagccgaggacacagccgtgtattattgtgccagaggcggccacggctacttcgatctttggggcagaggcaccctggtcaccgtttcttctacgcgtgcctctacaaagggaccctccgtgtttcctctggctccctgtagcagaagcaccagcgaatctacagccgctctgggctgcctggtcaaggactactttcctgagcctgtgaccgtgtcctggaacagcggagcactgacatctggcgtgcacacctttccagccgtgctccaaagcagcggcctgtactctctgagcagcgtggtcacagtgcctagctctagcctgggcaccaagacctacacctgtaatgtggaccacaagcctagcaacaccaaggtggacaagcgcgtggaatctaagtacggccctccttgtcctccatgtcctggtaccatccccgaggacacattcttcccaagccccgagagcagctgcgacgtgaagctggtggaaaagagcttcgagacagacaccaacctgaacttccagaacctgagcgtgatcggcttcagaatcctgctgctgaaagtggccggctttaacctgctgatgaccctgcggctgtggtccagccgcgccaagagaagcggatctggcgtgaagcagaccctgaatttcgacctgctgaagctggctggcgacgtggaatccaacccaggcccttctagaggccatatgaccgagtacaagcccacggtgcgcctcgccacccgcgacgacgtccccagggccgtacgcaccctcgccgccgcgttcgccgactaccccgccacgcgccacaccgtcgatccggaccgccacatcgagcgggtcaccgagctgcaagaactcttcctcacgcgcgtcgggctcgacatcggcaaggtgtgggtcgcggacgacggcgccgcggtggcggtctggaccacgccggagagcgtcgaagcgggggcggtgttcgccgagatcggcccgcgcatggccgagttgagcggttcccggctggccgcgcagcaacagatggaaggcctcctggcgccgcaccggcccaaggagcccgcgtggttcctggccaccgtcggcgtctcgcccgaccaccagggcaagggtctgggcagcgccgtcgtgctccccggagtggaggcggccgagcgcgccggggtgcccgccttcctggagacctccgcgccccgcaacctccccttctacgagcggctcggcttcaccgtcaccgccgacgtcgaggtgcccgaaggaccgcgcacctggtgcatgacccgcaagcccggtgcctga

SEQ ID NO: 8746 - DNA, 2430 bp, synthetic construct
  source 1..2430: mol_type = other DNA
atggccttaccagtgaccgccttgctcctgccgctggccttgctgctccacgccgccaggccggacatccagatgacacagagccctagcagcctgtctgccagcgtgggagacagagtgaccatcacctgtagagccagccaggacatcagcaactacctgaactggtatcagcagaagcccggcaaggcccctaagctgctgatctactacaccagcagactgcacagcggcgtgcccagcagattttctggctctggcagcggcaccgacttcaccctgacaatatctagcctccagcctgaggacttcgccacctactattgccagcagggcaacaccctgccttacacatttggacagggcaccaaggtggaaatcaagagactcgagacagtggccgccccatctgtattcatctttcctccatctgatgaacagcttaagtccggcactgcttctgttgtttgcctgcttaacaatttttacccgcgggaagccaaggtgcaatggaaagtggacaacgccctgcagtctggtaacagtcaggaaagcgtgactgaacaggacagcaaagactccacatactccttgagttccaccttgacgctcagtaaggcagactacgagaagcacaaggtttatgcctgtgaagtgactcaccagggcctctctagcccagtgactaagtccttcaaccgcggggagtgtaggaagcgacgggggtcaggcgccactaacttctctctgctgaaacaagccggggacgtggaggagaatccaggtcccactagtatggactggatttggcgcatccttttccttgtcggcgctgctaccggcgcgcattccttcgaagtgcagctggttgaatcaggtggcggcctggttcaacctggcggatctctgagactgagctgtgccgccagcggcttcaccttcagcgactactttatgagctgggtccgacaggcccctggcaaaggacttgaatgggtcgccaccatcagcaatggcggcacctacacttactaccccgacagcgtgaagggcagattcaccatctccagagacaacagcaagaacaccctgtacctccagatgaactccctgagagccgaggacaccgccgtgtactactgcgccagattcgacggctacatcttcgactattggggccagggcaccctggtcacagtctcttctacgcgtgcctctacaaagggaccctccgtgtttcctctggctccctgtagcagaagcaccagcgaatctacagccgctctgggctgcctggtcaaggactactttcctgagcctgtgaccgtgtcctggaacagcggagcactgacatctggcgtgcacacctttccagccgtgctccaaagcagcggcctgtactctctgagcagcgtggtcacagtgcctagctctagcctgggcaccaagacctacacctgtaatgtggaccacaagcctagcaacaccaaggtggacaagcgcgtggaatctaagtacggccctccttgtcctccatgtcctggtaccatccccgaggacacattcttcccaagccccgagagcagctgcgacgtgaagctggtggaaaagagcttcgagacagacaccaacctgaacttccagaacctgagcgtgatcggcttcagaatcctgctgctgaaagtggccggctttaacctgctgatgaccctgcggctgtggtccagccgcgccaagagaagcggatctggcgtgaagcagaccctgaatttcgacctgctgaagctggctggcgacgtggaatccaacccaggcccttctagaggccatatgaccgagtacaagcccacggtgcgcctcgccacccgcgacgacgtccccagggccgtacgcaccctcgccgccgcgttcgccgactaccccgccacgcgccacaccgtcgatccggaccgccacatcgagcgggtcaccgagctgcaagaactcttcctcacgcgcgtcgggctcgacatcggcaaggtgtgggtcgcggacgacggcgccgcggtggcggtctggaccacgccggagagcgtcgaagcgggggcggtgttcgccgagatcggcccgcgcatggccgagttgagcggttcccggctggccgcgcagcaacagatggaaggcctcctggcgccgcaccggcccaaggagcccgcgtggttcctggccaccgtcggcgtctcgcccgaccaccagggcaagggtctgggcagcgccgtcgtgctccccggagtggaggcggccgagcgcgccggggtgcccgccttcctggagacctccgcgccccgcaacctccccttctacgagcggctcggcttcaccgtcaccgccgacgtcgaggtgcccgaaggaccgcgcacctggtgcatgacccgcaagcccggtgcctga

SEQ ID NO: 8747 - DNA, 2442 bp, synthetic construct
  source 1..2442: mol_type = other DNA
atggccttaccagtgaccgccttgctcctgccgctggccttgctgctccacgccgccaggccggacatccagatgacccagagcagcagctacctgagcgtgtcccttggcggcagagtgaccatcacctgtaaagccagcgaccacatcaacaactggctggcctggtatcagcagaagcctggcaacgcccctagactgctgattagcggagccacctctctggaaacaggcgtgccaagcagattttccggcagcggctctggcaaggactacaccctgagcatcaccagcctccagaccgaggatgtggctacctactactgccagcagtattggagcaccccttggacctttggcggaggcaccaagctggaaatcaaactcgagacagtggccgccccatctgtattcatctttcctccatctgatgaacagcttaagtccggcactgcttctgttgtttgcctgcttaacaatttttacccgcgggaagccaaggtgcaatggaaagtggacaacgccctgcagtctggtaacagtcaggaaagcgtgactgaacaggacagcaaagactccacatactccttgagttccaccttgacgctcagtaaggcagactacgagaagcacaaggtttatgcctgtgaagtgactcaccagggcctctctagcccagtgactaagtccttcaaccgcggggagtgtaggaagcgacgggggtcaggcgccactaacttctctctgctgaaacaagccggggacgtggaggagaatccaggtcccactagtatggactggatttggcgcatccttttccttgtcggcgctgctaccggcgcgcattccttcgaacaggttcagctccagcagtctggcgctgagcttgctagacctggcgcttctgtgaagctgagctgcaaggccagcggctacaccttcaccagctactggatgcagtgggtcaagcagaggccaggccaaggactggaatggatcggagccatctatcccggcgacggcgataccagatacacccagaagttcaagggcaaagccacactgaccgccgacaagagcagctccacagcctacatgcaactgagcagcctggcttccgaggacagcgccgtgtactattgtgccagaggcaaggtgtactacggcagcaaccctttcgcctattggggccagggaaccctggttacagtgtctgctacgcgtgcctctacaaagggaccctccgtgtttcctctggctccctgtagcagaagcaccagcgaatctacagccgctctgggctgcctggtcaaggactactttcctgagcctgtgaccgtgtcctggaacagcggagcactgacatctggcgtgcacacctttccagccgtgctccaaagcagcggcctgtactctctgagcagcgtggtcacagtgcctagctctagcctgggcaccaagacctacacctgtaatgtggaccacaagcctagcaacaccaaggtggacaagcgcgtggaatctaagtacggccctccttgtcctccatgtcctggtaccatccccgaggacacattcttcccaagccccgagagcagctgcgacgtgaagctggtggaaaagagcttcgagacagacaccaacctgaacttccagaacctgagcgtgatcggcttcagaatcctgctgctgaaagtggccggctttaacctgctgatgaccctgcggctgtggtccagccgcgccaagagaagcggatctggcgtgaagcagaccctgaatttcgacctgctgaagctggctggcgacgtggaatccaacccaggcccttctagaggccatatgaccgagtacaagcccacggtgcgcctcgccacccgcgacgacgtccccagggccgtacgcaccctcgccgccgcgttcgccgactaccccgccacgcgccacaccgtcgatccggaccgccacatcgagcgggtcaccgagctgcaagaactcttcctcacgcgcgtcgggctcgacatcggcaaggtgtgggtcgcggacgacggcgccgcggtggcggtctggaccacgccggagagcgtcgaagcgggggcggtgttcgccgagatcggcccgcgcatggccgagttgagcggttcccggctggccgcgcagcaacagatggaaggcctcctggcgccgcaccggcccaaggagcccgcgtggttcctggccaccgtcggcgtctcgcccgaccaccagggcaagggtctgggcagcgccgtcgtgctccccggagtggaggcggccgagcgcgccggggtgcccgccttcctggagacctccgcgccccgcaacctccccttctacgagcggctcggcttcaccgtcaccgccgacgtcgaggtgcccgaaggaccgcgcacctggtgcatgacccgcaagcccggtgcctga

SEQ ID NO: 8748 - DNA, 2418 bp, synthetic construct
  source 1..2418: mol_type = other DNA
atggccttaccagtgaccgccttgctcctgccgctggccttgctgctccacgccgccaggccggacatccagatgacacagagccctagcagcctgtctgccagcgtgggagacagagtgaccatcacctgtagagccagccaggacatcagcaactacctgaactggtatcagcagaagcccggcaaggcccctaagctgctgatctactacaccagcagactgcacagcggcgtgcccagcagattttctggctctggcagcggcaccgacttcaccctgacaatatctagcctccagcctgaggacttcgccacctactattgccagcagggcaacaccctgccttacacatttggacagggcaccaaggtggaaatcaagagactcgagacagtggccgccccatctgtattcatctttcctccatctgatgaacagcttaagtccggcactgcttctgttgtttgcctgcttaacaatttttacccgcgggaagccaaggtgcaatggaaagtggacaacgccctgcagtctggtaacagtcaggaaagcgtgactgaacaggacagcaaagactccacatactccttgagttccaccttgacgctcagtaaggcagactacgagaagcacaaggtttatgcctgtgaagtgactcaccagggcctctctagcccagtgactaagtccttcaaccgcggggagtgtaggaagcgacgggggtcaggcgccactaacttctctctgctgaaacaagccggggacgtggaggagaatccaggtcccactagtatggactggatttggcgcatccttttccttgtcggcgctgctaccggcgcgcattccttcgaagtgcagctggttgaatcaggtggcggcctggttcaacctggcggatctctgagactgagctgtgccgccagcggcttcaccttcagcgactactttatgagctgggtccgacaggcccctggcaaaggacttgaatgggtcgccaccatcagcaatggcggcacctacacttactaccccgacagcgtgaagggcagattcaccatctccagagacaacagcaagaacaccctgtacctccagatgaactccctgagagccgaggacaccgccgtgtactactgcgccagattcgacggctacatcttcgactattggggccagggcaccctggtcacagtctcttctacgcgtgcctctacaaagggaccctccgtgtttcctctggctccctgtagcagaagcaccagcgaatctacagccgctctgggctgcctggtcaaggactactttcctgagcctgtgaccgtgtcctggaacagcggagcactgacatctggcgtgcacacctttccagccgtgctccaaagcagcggcctgtactctctgagcagcgtggtcacagtgcctagctctagcctgggcaccaagacctacacctgtaatgtggaccacaagcctagcaacaccaaggtggacaagcgcgtgggtaccgaagtgaaaaccgactccaccgaccacgtgaagcccaaagagacagagaacaccaagcagcccagcaagagctgccacaagcccaaggccatcgtgcacaccgagaaagtgaacatgatgagcctgaccgtgctgggcttcagaatcctgctgctgaaagtggccggctttaacctgctgatgaccctgcggctgtggtccagccgcgccaagagaagcggatctggcgtgaagcagaccctgaatttcgacctgctgaagctggctggcgacgtggaatccaacccaggcccttctagaggccatatgaccgagtacaagcccacggtgcgcctcgccacccgcgacgacgtccccagggccgtacgcaccctcgccgccgcgttcgccgactaccccgccacgcgccacaccgtcgatccggaccgccacatcgagcgggtcaccgagctgcaagaactcttcctcacgcgcgtcgggctcgacatcggcaaggtgtgggtcgcggacgacggcgccgcggtggcggtctggaccacgccggagagcgtcgaagcgggggcggtgttcgccgagatcggcccgcgcatggccgagttgagcggttcccggctggccgcgcagcaacagatggaaggcctcctggcgccgcaccggcccaaggagcccgcgtggttcctggccaccgtcggcgtctcgcccgaccaccagggcaagggtctgggcagcgccgtcgtgctccccggagtggaggcggccgagcgcgccggggtgcccgccttcctggagacctccgcgccccgcaacctccccttctacgagcggctcggcttcaccgtcaccgccgacgtcgaggtgcccgaaggaccgcgcacctggtgcatgacccgcaagcccggtgcctga

SEQ ID NO: 8749 - DNA, 2430 bp, synthetic construct
  source 1..2430: mol_type = other DNA
atggccttaccagtgaccgccttgctcctgccgctggccttgctgctccacgccgccaggccggacatccagatgacccagagcagcagctacctgagcgtgtcccttggcggcagagtgaccatcacctgtaaagccagcgaccacatcaacaactggctggcctggtatcagcagaagcctggcaacgcccctagactgctgattagcggagccacctctctggaaacaggcgtgccaagcagattttccggcagcggctctggcaaggactacaccctgagcatcaccagcctccagaccgaggatgtggctacctactactgccagcagtattggagcaccccttggacctttggcggaggcaccaagctggaaatcaaactcgagacagtggccgccccatctgtattcatctttcctccatctgatgaacagcttaagtccggcactgcttctgttgtttgcctgcttaacaatttttacccgcgggaagccaaggtgcaatggaaagtggacaacgccctgcagtctggtaacagtcaggaaagcgtgactgaacaggacagcaaagactccacatactccttgagttccaccttgacgctcagtaaggcagactacgagaagcacaaggtttatgcctgtgaagtgactcaccagggcctctctagcccagtgactaagtccttcaaccgcggggagtgtaggaagcgacgggggtcaggcgccactaacttctctctgctgaaacaagccggggacgtggaggagaatccaggtcccactagtatggactggatttggcgcatccttttccttgtcggcgctgctaccggcgcgcattccttcgaacaggttcagctccagcagtctggcgctgagcttgctagacctggcgcttctgtgaagctgagctgcaaggccagcggctacaccttcaccagctactggatgcagtgggtcaagcagaggccaggccaaggactggaatggatcggagccatctatcccggcgacggcgataccagatacacccagaagttcaagggcaaagccacactgaccgccgacaagagcagctccacagcctacatgcaactgagcagcctggcttccgaggacagcgccgtgtactattgtgccagaggcaaggtgtactacggcagcaaccctttcgcctattggggccagggaaccctggttacagtgtctgctacgcgtgcctctacaaagggaccctccgtgtttcctctggctccctgtagcagaagcaccagcgaatctacagccgctctgggctgcctggtcaaggactactttcctgagcctgtgaccgtgtcctggaacagcggagcactgacatctggcgtgcacacctttccagccgtgctccaaagcagcggcctgtactctctgagcagcgtggtcacagtgcctagctctagcctgggcaccaagacctacacctgtaatgtggaccacaagcctagcaacaccaaggtggacaagcgcgtgggtaccgaagtgaaaaccgactccaccgaccacgtgaagcccaaagagacagagaacaccaagcagcccagcaagagctgccacaagcccaaggccatcgtgcacaccgagaaagtgaacatgatgagcctgaccgtgctgggcttcagaatcctgctgctgaaagtggccggctttaacctgctgatgaccctgcggctgtggtccagccgcgccaagagaagcggatctggcgtgaagcagaccctgaatttcgacctgctgaagctggctggcgacgtggaatccaacccaggcccttctagaggccatatgaccgagtacaagcccacggtgcgcctcgccacccgcgacgacgtccccagggccgtacgcaccctcgccgccgcgttcgccgactaccccgccacgcgccacaccgtcgatccggaccgccacatcgagcgggtcaccgagctgcaagaactcttcctcacgcgcgtcgggctcgacatcggcaaggtgtgggtcgcggacgacggcgccgcggtggcggtctggaccacgccggagagcgtcgaagcgggggcggtgttcgccgagatcggcccgcgcatggccgagttgagcggttcccggctggccgcgcagcaacagatggaaggcctcctggcgccgcaccggcccaaggagcccgcgtggttcctggccaccgtcggcgtctcgcccgaccaccagggcaagggtctgggcagcgccgtcgtgctccccggagtggaggcggccgagcgcgccggggtgcccgccttcctggagacctccgcgccccgcaacctccccttctacgagcggctcggcttcaccgtcaccgccgacgtcgaggtgcccgaaggaccgcgcacctggtgcatgacccgcaagcccggtgcctga

SEQ ID NO: 8750 - DNA, 2763 bp, synthetic construct
  source 1..2763: mol_type = other DNA
atggccttaccagtgaccgccttgctcctgccgctggccttgctgctccacgccgccaggccggagatcgtgctgacacagtctcccgccacactgtcactgtctccaggcgaaagagccacactgagctgtagagccagccagagcgtgtcctcttacctggcctggtatcagcagaagcctggacaggctccccggctgctgatctacgatgccagcaatagagccacaggcatccccgccagattttctggctctggcagcggcaccgatttcaccctgaccataagcagcctggaacctgaggacttcgccgtgtactactgccagcagagaagcgactggcccctgacatttggcggcggaacaaaggtggaaatcaaactcgagacagtggccgccccatctgtattcatctttcctccatctgatgaacagcttaagtccggcactgcttctgttgtttgcctgcttaacaatttttacccgcgggaagccaaggtgcaatggaaagtggacaacgccctgcagtctggtaacagtcaggaaagcgtgactgaacaggacagcaaagactccacatactccttgagttccaccttgacgctcagtaaggcagactacgagaagcacaaggtttatgcctgtgaagtgactcaccagggcctctctagcccagtgactaagtccttcaaccgcggggagtgtaggaagcgacgggggtcaggcgccactaacttctctctgctgaaacaagccggggacgtggaggagaatccaggtcccactagtatggactggatttggcgcatccttttccttgtcggcgctgctaccggcgcgcattccttcgaagttcagctccttgagagtggtggcggcctggttcaacctggcggatctctgagactgtcttgtgccgccagcggcttcacctttagcggctattggatgcactgggtccgacaggcccctggcaaaggacttgaatgggtgtccgccatcagaagcgacggcagcagcaagtactacgccgactctgtgaagggcagattcaccatcagccgggacaacagcaagaacaccctgtacctccagatgaacagcctgagagccgaggacacagccgtgtattattgcgccaaggacggcgtgatcgaggacacctttgattactggggccagggcaccctggtcaccgtttcttctacgcgtgcctctacaaagggaccctccgtgtttcctctggctccctgtagcagaagcaccagcgaatctacagccgctctgggctgcctggtcaaggactactttcctgagcctgtgaccgtgtcctggaacagcggagcactgacatctggcgtgcacacctttccagccgtgctccaaagcagcggcctgtactctctgagcagcgtggtcacagtgcctagctctagcctgggcaccaagacctacacctgtaatgtggaccacaagcctagcaacaccaaggtggacaagcgcgtggaatctaagtacggccctccttgtcctccatgtcctggtaccatccccgaggacacattcttcccaagccccgagagcagctgcgacgtgaagctggtggaaaagagcttcgagacagacaccaacctgaacttccagaacctgagcgtgatcggcttcagaatcctgctgctgaaagtggccggctttaacctgctgatgaccctgcggctgtggtccagccgcgccaagagaagcggatctggcgtgaagcagaccctgaatttcgacctgctgaagctggctggcgacgtggaatccaacccaggcccttctagagccaccatggactggatttggcgcatccttttccttgtcggcgctgctaccggcgcgcattccttcgaacaactccaggtgcaggaatctggccccggactcgtgaagcccagcgagacactgagcctgacctgtaccgtgtccggcggcagcatcagcaacagctacttctcctggggctggatcagacagccccctggcaagggcctggaatggatcggcagcttctactacggcgagaaaacctactacaaccccagcctgaagtccagagccaccatcagcatcgacaccagcaagagccagttctccctgaagctgagcagcgtgacagccgccgacaccgccgtgtattattgccccagaggccccaccatgatccggggcgtgatcgactcttggggccagggaacactcgtgaccgtgtcctctacgcgtgccagcaccaagggacccagcgttttcccactggctccctgtagcagaagcaccagcgaatctacagccgctctgggctgcctggtcaaggactactttcctgagcctgtgaccgtgtcctggaacagcggagcactgacatctggcgtgcacacctttccagccgtgctgcaaagcagcggcctgtactctctgagcagcgtggtcacagtgccaagctctagcctgggcaccaagacctacacctgtaatgtggaccacaagcctagcaacaccaaggtggacaagcgcgtggaatctaagtacggacctcctgcacctccagcacctggatccggcagagccgattgcggctttaccagcgagagctaccagcagggcgtgctgagcgccaccatcctgtacgagatcctgctgggcaaggccaccctgtacgccgtgctggtgtctgccctggtgctgatggctatggtcaagcggaaggacagccggggataa

SEQ ID NO: 8751 - DNA, 2772 bp, synthetic construct
  source 1..2772: mol_type = other DNA
atggccttaccagtgaccgccttgctcctgccgctggccttgctgctccacgccgccaggccggagatcgtgctgacacagtctcccgccacactgtcactgtctccaggcgaaagagccacactgagctgtagagccagccagagcgtgtcctcttacctggcctggtatcagcagaagcctggacaggctccccggctgctgatctacgatgccagcaatagagccacaggcatccccgccagattttctggctctggcagcggcaccgatttcaccctgaccataagcagcctggaacctgaggacttcgccgtgtactactgccagcagagaagcgactggcccctgacatttggcggcggaacaaaggtggaaatcaaactcgagacagtggccgccccatctgtattcatctttcctccatctgatgaacagcttaagtccggcactgcttctgttgtttgcctgcttaacaatttttacccgcgggaagccaaggtgcaatggaaagtggacaacgccctgcagtctggtaacagtcaggaaagcgtgactgaacaggacagcaaagactccacatactccttgagttccaccttgacgctcagtaaggcagactacgagaagcacaaggtttatgcctgtgaagtgactcaccagggcctctctagcccagtgactaagtccttcaaccgcggggagtgtaggaagcgacgggggtcaggcgccactaacttctctctgctgaaacaagccggggacgtggaggagaatccaggtcccactagtatggactggatttggcgcatccttttccttgtcggcgctgctaccggcgcgcattccttcgaagtgcaactggttcaatcaggtggcggcctggttcaccctggcggatctctgagactgtcttgtaccggcagcggcttcaccttcagctaccacgccatgcactgggtccgacaggcacctggaaaaggactggaatgggtgtccatcatcggcacaggcggcgtgacctactacgccgattctgtgaagggcagattcaccatcagccgggacaacgtgaagaacagcctgtacctccagatgaactccctgagagccgaggatatggccgtgtattattgcgccagagactactacggcgctggcagcttttacgacggcctgtacggaatggatgtgtggggccagggaaccaccgtgactgtctcttctacgcgtgcctctacaaagggaccctccgtgtttcctctggctccctgtagcagaagcaccagcgaatctacagccgctctgggctgcctggtcaaggactactttcctgagcctgtgaccgtgtcctggaacagcggagcactgacatctggcgtgcacacctttccagccgtgctccaaagcagcggcctgtactctctgagcagcgtggtcacagtgcctagctctagcctgggcaccaagacctacacctgtaatgtggaccacaagcctagcaacaccaaggtggacaagcgcgtggaatctaagtacggccctccttgtcctccatgtcctggtaccatccccgaggacacattcttcccaagccccgagagcagctgcgacgtgaagctggtggaaaagagcttcgagacagacaccaacctgaacttccagaacctgagcgtgatcggcttcagaatcctgctgctgaaagtggccggctttaacctgctgatgaccctgcggctgtggtccagccgcgccaagagaagcggatctggcgtgaagcagaccctgaatttcgacctgctgaagctggctggcgacgtggaatccaacccaggcccttctagagccaccatggactggatttggcgcatccttttccttgtcggcgctgctaccggcgcgcattccttcgaagttcagctccttgagagtggtggcggcctggttcaacctggcggatctctgagactgtcttgtgccgccagcggcttcacctttagcggctattggatgcactgggtccgacaggcccctggcaaaggacttgaatgggtgtccgccatcagaagcgacggcagcagcaagtactacgccgactctgtgaagggcagattcaccatcagccgggacaacagcaagaacaccctgtacctccagatgaacagcctgagagccgaggacacagccgtgtattattgcgccaaggacggcgtgatcgaggacacctttgattactggggccagggcaccctggtcaccgtttcttctacgcgtgccagcaccaagggacccagcgttttcccactggctccctgtagcagaagcaccagcgaatctacagccgctctgggctgcctggtcaaggactactttcctgagcctgtgaccgtgtcctggaacagcggagcactgacatctggcgtgcacacctttccagccgtgctgcaaagcagcggcctgtactctctgagcagcgtggtcacagtgccaagctctagcctgggcaccaagacctacacctgtaatgtggaccacaagcctagcaacaccaaggtggacaagcgcgtggaatctaagtacggacctcctgcacctccagcacctggatccggcagagccgattgcggctttaccagcgagagctaccagcagggcgtgctgagcgccaccatcctgtacgagatcctgctgggcaaggccaccctgtacgccgtgctggtgtctgccctggtgctgatggctatggtcaagcggaaggacagccggggataa

SEQ ID NO: 8752 - DNA, 2784 bp, synthetic construct
  source 1..2784: mol_type = other DNA
atggccttaccagtgaccgccttgctcctgccgctggccttgctgctccacgccgccaggccggagatcgtgctgacacagtctcccgccacactgtcactgtctccaggcgaaagagccacactgagctgtagagccagccagagcgtgtcctcttacctggcctggtatcagcagaagcctggacaggctccccggctgctgatctacgatgccagcaatagagccacaggcatccccgccagattttctggctctggcagcggcaccgatttcaccctgaccataagcagcctggaacctgaggacttcgccgtgtactactgccagcagagaagcgactggcccctgacatttggcggcggaacaaaggtggaaatcaaactcgagacagtggccgccccatctgtattcatctttcctccatctgatgaacagcttaagtccggcactgcttctgttgtttgcctgcttaacaatttttacccgcgggaagccaaggtgcaatggaaagtggacaacgccctgcagtctggtaacagtcaggaaagcgtgactgaacaggacagcaaagactccacatactccttgagttccaccttgacgctcagtaaggcagactacgagaagcacaaggtttatgcctgtgaagtgactcaccagggcctctctagcccagtgactaagtccttcaaccgcggggagtgtaggaagcgacgggggtcaggcgccactaacttctctctgctgaaacaagccggggacgtggaggagaatccaggtcccactagtatggactggatttggcgcatccttttccttgtcggcgctgctaccggcgcgcattccttcgaagtgcaactggttcaatcaggtggcggcctggttcaccctggcggatctctgagactgtcttgtaccggcagcggcttcaccttcagctaccacgccatgcactgggtccgacaggcacctggaaaaggactggaatgggtgtccatcatcggcacaggcggcgtgacctactacgccgattctgtgaagggcagattcaccatcagccgggacaacgtgaagaacagcctgtacctccagatgaactccctgagagccgaggatatggccgtgtattattgcgccagagactactacggcgctggcagcttttacgacggcctgtacggaatggatgtgtggggccagggaaccaccgtgactgtctcttctacgcgtgcctctacaaagggaccctccgtgtttcctctggctccctgtagcagaagcaccagcgaatctacagccgctctgggctgcctggtcaaggactactttcctgagcctgtgaccgtgtcctggaacagcggagcactgacatctggcgtgcacacctttccagccgtgctccaaagcagcggcctgtactctctgagcagcgtggtcacagtgcctagctctagcctgggcaccaagacctacacctgtaatgtggaccacaagcctagcaacaccaaggtggacaagcgcgtggaatctaagtacggccctccttgtcctccatgtcctggtaccatccccgaggacacattcttcccaagccccgagagcagctgcgacgtgaagctggtggaaaagagcttcgagacagacaccaacctgaacttccagaacctgagcgtgatcggcttcagaatcctgctgctgaaagtggccggctttaacctgctgatgaccctgcggctgtggtccagccgcgccaagagaagcggatctggcgtgaagcagaccctgaatttcgacctgctgaagctggctggcgacgtggaatccaacccaggcccttctagagccaccatggactggatttggcgcatccttttccttgtcggcgctgctaccggcgcgcattccttcgaagaagtgcagctggtggaatcaggcggcggactggtgcagcctggcagaagcctgagactgagctgtgccgccagcggcttcaccttcaacgactacgccatgcactgggtgcgccaggcccctggaaaaggactggaatgggtgtccacaatcagctggaacagcggcagcatcggctacgccgatagcgtgaagggccggttcaccatcagccgggacaacgccaagaagtccctgtacctccagatgaacagcctgcgggccgaggacacagccctgtactattgcgccaaggacatccagtacggcaactactactacggcatggacgtgtggggccagggaaccaccgtgaccgtgtcatctacgcgtgccagcaccaagggacccagcgttttcccactggctccctgtagcagaagcaccagcgaatctacagccgctctgggctgcctggtcaaggactactttcctgagcctgtgaccgtgtcctggaacagcggagcactgacatctggcgtgcacacctttccagccgtgctgcaaagcagcggcctgtactctctgagcagcgtggtcacagtgccaagctctagcctgggcaccaagacctacacctgtaatgtggaccacaagcctagcaacaccaaggtggacaagcgcgtggaatctaagtacggacctcctgcacctccagcacctggatccggcagagccgattgcggctttaccagcgagagctaccagcagggcgtgctgagcgccaccatcctgtacgagatcctgctgggcaaggccaccctgtacgccgtgctggtgtctgccctggtgctgatggctatggtcaagcggaaggacagccggggataa

SEQ ID NO: 8753 - DNA, 2778 bp, synthetic construct
  source 1..2778: mol_type = other DNA
atggccttaccagtgaccgccttgctcctgccgctggccttgctgctccacgccgccaggccggagatcgtgctgacacagtctcccgccacactgtcactgtctccaggcgaaagagccacactgagctgtagagccagccagagcgtgtcctcttacctggcctggtatcagcagaagcctggacaggctccccggctgctgatctacgatgccagcaatagagccacaggcatccccgccagattttctggctctggcagcggcaccgatttcaccctgaccataagcagcctggaacctgaggacttcgccgtgtactactgccagcagagaagcgactggcccctgacatttggcggcggaacaaaggtggaaatcaaactcgagacagtggccgccccatctgtattcatctttcctccatctgatgaacagcttaagtccggcactgcttctgttgtttgcctgcttaacaatttttacccgcgggaagccaaggtgcaatggaaagtggacaacgccctgcagtctggtaacagtcaggaaagcgtgactgaacaggacagcaaagactccacatactccttgagttccaccttgacgctcagtaaggcagactacgagaagcacaaggtttatgcctgtgaagtgactcaccagggcctctctagcccagtgactaagtccttcaaccgcggggagtgtaggaagcgacgggggtcaggcgccactaacttctctctgctgaaacaagccggggacgtggaggagaatccaggtcccactagtatggactggatttggcgcatccttttccttgtcggcgctgctaccggcgcgcattccttcgaagtgcaactggttcaatcaggtggcggcctggttcaccctggcggatctctgagactgtcttgtaccggcagcggcttcaccttcagctaccacgccatgcactgggtccgacaggcacctggaaaaggactggaatgggtgtccatcatcggcacaggcggcgtgacctactacgccgattctgtgaagggcagattcaccatcagccgggacaacgtgaagaacagcctgtacctccagatgaactccctgagagccgaggatatggccgtgtattattgcgccagagactactacggcgctggcagcttttacgacggcctgtacggaatggatgtgtggggccagggaaccaccgtgactgtctcttctacgcgtgcctctacaaagggaccctccgtgtttcctctggctccctgtagcagaagcaccagcgaatctacagccgctctgggctgcctggtcaaggactactttcctgagcctgtgaccgtgtcctggaacagcggagcactgacatctggcgtgcacacctttccagccgtgctccaaagcagcggcctgtactctctgagcagcgtggtcacagtgcctagctctagcctgggcaccaagacctacacctgtaatgtggaccacaagcctagcaacaccaaggtggacaagcgcgtggaatctaagtacggccctccttgtcctccatgtcctggtaccatccccgaggacacattcttcccaagccccgagagcagctgcgacgtgaagctggtggaaaagagcttcgagacagacaccaacctgaacttccagaacctgagcgtgatcggcttcagaatcctgctgctgaaagtggccggctttaacctgctgatgaccctgcggctgtggtccagccgcgccaagagaagcggatctggcgtgaagcagaccctgaatttcgacctgctgaagctggctggcgacgtggaatccaacccaggcccttctagagccaccatggactggatttggcgcatccttttccttgtcggcgctgctaccggcgcgcattccttcgaacaagttcagctggttcagagcggagccgaagtgaagaaacctggcagcagcgtgaaggtgtcctgcaaagcaagcggcggcacctttagcacctacgccatccactgggttcgacaggcaccaggacaaggactggaatggatgggcagaatcatccccatcgagggcagagcctactacgcccagaaattccagggcagagtgaccatcaccgccgacgagtctacaagcaccgcctacatggaactgagcagcctgagaagcgaggataccgctgtgtactattgcgccagaggccggtacagctacagatattggttcgactactggggccagggcaccctggttacagtctcttctacgcgtgccagcaccaagggacccagcgttttcccactggctccctgtagcagaagcaccagcgaatctacagccgctctgggctgcctggtcaaggactactttcctgagcctgtgaccgtgtcctggaacagcggagcactgacatctggcgtgcacacctttccagccgtgctgcaaagcagcggcctgtactctctgagcagcgtggtcacagtgccaagctctagcctgggcaccaagacctacacctgtaatgtggaccacaagcctagcaacaccaaggtggacaagcgcgtggaatctaagtacggacctcctgcacctccagcacctggatccggcagagccgattgcggctttaccagcgagagctaccagcagggcgtgctgagcgccaccatcctgtacgagatcctgctgggcaaggccaccctgtacgccgtgctggtgtctgccctggtgctgatggctatggtcaagcggaaggacagccggggataa

SEQ ID NO: 8754 - DNA, 2781 bp, synthetic construct
  source 1..2781: mol_type = other DNA
atggccttaccagtgaccgccttgctcctgccgctggccttgctgctccacgccgccaggccggagatcgtgctgacacagtctcccgccacactgtcactgtctccaggcgaaagagccacactgagctgtagagccagccagagcgtgtcctcttacctggcctggtatcagcagaagcctggacaggctccccggctgctgatctacgatgccagcaatagagccacaggcatccccgccagattttctggctctggcagcggcaccgatttcaccctgaccataagcagcctggaacctgaggacttcgccgtgtactactgccagcagagaagcgactggcccctgacatttggcggcggaacaaaggtggaaatcaaactcgagacagtggccgccccatctgtattcatctttcctccatctgatgaacagcttaagtccggcactgcttctgttgtttgcctgcttaacaatttttacccgcgggaagccaaggtgcaatggaaagtggacaacgccctgcagtctggtaacagtcaggaaagcgtgactgaacaggacagcaaagactccacatactccttgagttccaccttgacgctcagtaaggcagactacgagaagcacaaggtttatgcctgtgaagtgactcaccagggcctctctagcccagtgactaagtccttcaaccgcggggagtgtaggaagcgacgggggtcaggcgccactaacttctctctgctgaaacaagccggggacgtggaggagaatccaggtcccactagtatggactggatttggcgcatccttttccttgtcggcgctgctaccggcgcgcattccttcgaagtgcaactggttcaatcaggtggcggcctggttcaccctggcggatctctgagactgtcttgtaccggcagcggcttcaccttcagctaccacgccatgcactgggtccgacaggcacctggaaaaggactggaatgggtgtccatcatcggcacaggcggcgtgacctactacgccgattctgtgaagggcagattcaccatcagccgggacaacgtgaagaacagcctgtacctccagatgaactccctgagagccgaggatatggccgtgtattattgcgccagagactactacggcgctggcagcttttacgacggcctgtacggaatggatgtgtggggccagggaaccaccgtgactgtctcttctacgcgtgcctctacaaagggaccctccgtgtttcctctggctccctgtagcagaagcaccagcgaatctacagccgctctgggctgcctggtcaaggactactttcctgagcctgtgaccgtgtcctggaacagcggagcactgacatctggcgtgcacacctttccagccgtgctccaaagcagcggcctgtactctctgagcagcgtggtcacagtgcctagctctagcctgggcaccaagacctacacctgtaatgtggaccacaagcctagcaacaccaaggtggacaagcgcgtggaatctaagtacggccctccttgtcctccatgtcctggtaccatccccgaggacacattcttcccaagccccgagagcagctgcgacgtgaagctggtggaaaagagcttcgagacagacaccaacctgaacttccagaacctgagcgtgatcggcttcagaatcctgctgctgaaagtggccggctttaacctgctgatgaccctgcggctgtggtccagccgcgccaagagaagcggatctggcgtgaagcagaccctgaatttcgacctgctgaagctggctggcgacgtggaatccaacccaggcccttctagagccaccatggactggatttggcgcatccttttccttgtcggcgctgctaccggcgcgcattccttcgaacaactccaggtgcaggaatctggccccggactcgtgaagcccagcgagacactgagcctgacctgtaccgtgtccggcggcagcatcagcaacagctacttctcctggggctggatcagacagccccctggcaagggcctggaatggatcggcagcttctactacggcgagaaaacctactacaaccccagcctgaagtccagagccaccatcagcatcgacaccagcaagagccagttctccctgaagctgagcagcgtgacagccgccgacaccgccgtgtattattgccccagaggccccaccatgatccggggcgtgatcgactcttggggccagggaacactcgtgaccgtgtcctctacgcgtgccagcaccaagggacccagcgttttcccactggctccctgtagcagaagcaccagcgaatctacagccgctctgggctgcctggtcaaggactactttcctgagcctgtgaccgtgtcctggaacagcggagcactgacatctggcgtgcacacctttccagccgtgctgcaaagcagcggcctgtactctctgagcagcgtggtcacagtgccaagctctagcctgggcaccaagacctacacctgtaatgtggaccacaagcctagcaacaccaaggtggacaagcgcgtggaatctaagtacggacctcctgcacctccagcacctggatccggcagagccgattgcggctttaccagcgagagctaccagcagggcgtgctgagcgccaccatcctgtacgagatcctgctgggcaaggccaccctgtacgccgtgctggtgtctgccctggtgctgatggctatggtcaagcggaaggacagccggggataa

SEQ ID NO: 8755 - DNA, 2775 bp, synthetic construct
  source 1..2775: mol_type = other DNA
atggccttaccagtgaccgccttgctcctgccgctggccttgctgctccacgccgccaggccggagatcgtgctgacacagtctcccgccacactgtcactgtctccaggcgaaagagccacactgagctgtagagccagccagagcgtgtcctcttacctggcctggtatcagcagaagcctggacaggctccccggctgctgatctacgatgccagcaatagagccacaggcatccccgccagattttctggctctggcagcggcaccgatttcaccctgaccataagcagcctggaacctgaggacttcgccgtgtactactgccagcagagaagcaactggcccctgacctttggacagggcaccaaggtggaaatcaagagactcgagacagtggccgccccatctgtattcatctttcctccatctgatgaacagcttaagtccggcactgcttctgttgtttgcctgcttaacaatttttacccgcgggaagccaaggtgcaatggaaagtggacaacgccctgcagtctggtaacagtcaggaaagcgtgactgaacaggacagcaaagactccacatactccttgagttccaccttgacgctcagtaaggcagactacgagaagcacaaggtttatgcctgtgaagtgactcaccagggcctctctagcccagtgactaagtccttcaaccgcggggagtgtaggaagcgacgggggtcaggcgccactaacttctctctgctgaaacaagccggggacgtggaggagaatccaggtcccactagtatggactggatttggcgcatccttttccttgtcggcgctgctaccggcgcgcattccttcgaagtgcaactggttcaatcaggtggcggcctggttcaccctggcggatctctgagactgtcttgtaccggcagcggcttcaccttcagctaccacgccatgcactgggtccgacaggcacctggaaaaggactggaatgggtgtccatcatcggcacaggcggcgtgacctactacgccgattctgtgaagggcagattcaccatcagccgggacaacgtgaagaacagcctgtacctccagatgaactccctgagagccgaggatatggccgtgtattattgcgccagagactactacggcgctggcagcttttacgacggcctgtacggaatggatgtgtggggccagggaaccaccgtgactgtctcttctacgcgtgcctctacaaagggaccctccgtgtttcctctggctccctgtagcagaagcaccagcgaatctacagccgctctgggctgcctggtcaaggactactttcctgagcctgtgaccgtgtcctggaacagcggagcactgacatctggcgtgcacacctttccagccgtgctccaaagcagcggcctgtactctctgagcagcgtggtcacagtgcctagctctagcctgggcaccaagacctacacctgtaatgtggaccacaagcctagcaacaccaaggtggacaagcgcgtggaatctaagtacggccctccttgtcctccatgtcctggtaccatccccgaggacacattcttcccaagccccgagagcagctgcgacgtgaagctggtggaaaagagcttcgagacagacaccaacctgaacttccagaacctgagcgtgatcggcttcagaatcctgctgctgaaagtggccggctttaacctgctgatgaccctgcggctgtggtccagccgcgccaagagaagcggatctggcgtgaagcagaccctgaatttcgacctgctgaagctggctggcgacgtggaatccaacccaggcccttctagagccaccatggactggatttggcgcatccttttccttgtcggcgctgctaccggcgcgcattccttcgaagttcagctccttgagagtggtggcggcctggttcaacctggcggatctctgagactgtcttgtgccgccagcggcttcacctttagcggctattggatgcactgggtccgacaggcccctggcaaaggacttgaatgggtgtccgccatcagaagcgacggcagcagcaagtactacgccgactctgtgaagggcagattcaccatcagccgggacaacagcaagaacaccctgtacctccagatgaacagcctgagagccgaggacacagccgtgtattattgcgccaaggacggcgtgatcgaggacacctttgattactggggccagggcaccctggtcaccgtttcttctacgcgtgccagcaccaagggacccagcgttttcccactggctccctgtagcagaagcaccagcgaatctacagccgctctgggctgcctggtcaaggactactttcctgagcctgtgaccgtgtcctggaacagcggagcactgacatctggcgtgcacacctttccagccgtgctgcaaagcagcggcctgtactctctgagcagcgtggtcacagtgccaagctctagcctgggcaccaagacctacacctgtaatgtggaccacaagcctagcaacaccaaggtggacaagcgcgtggaatctaagtacggacctcctgcacctccagcacctggatccggcagagccgattgcggctttaccagcgagagctaccagcagggcgtgctgagcgccaccatcctgtacgagatcctgctgggcaaggccaccctgtacgccgtgctggtgtctgccctggtgctgatggctatggtcaagcggaaggacagccggggataa

SEQ ID NO: 8756 - DNA, 2778 bp, synthetic construct
  source 1..2778: mol_type = other DNA
atggccttaccagtgaccgccttgctcctgccgctggccttgctgctccacgccgccaggccggagatcgtgctgacacagtctcccgccacactgtcactgtctccaggcgaaagagccacactgagctgtagagccagccagagcgtgtcctcttacctggcctggtatcagcagaagcctggacaggctccccggctgctgatctacgatgccagcaatagagccacaggcatccccgccagattttctggctctggcagcggcaccgatttcaccctgaccataagcagcctggaacctgaggacttcgccgtgtactactgccagcagagaagcgactggcccctgacatttggcggcggaacaaaggtggaaatcaaactcgagacagtggccgccccatctgtattcatctttcctccatctgatgaacagcttaagtccggcactgcttctgttgtttgcctgcttaacaatttttacccgcgggaagccaaggtgcaatggaaagtggacaacgccctgcagtctggtaacagtcaggaaagcgtgactgaacaggacagcaaagactccacatactccttgagttccaccttgacgctcagtaaggcagactacgagaagcacaaggtttatgcctgtgaagtgactcaccagggcctctctagcccagtgactaagtccttcaaccgcggggagtgtaggaagcgacgggggtcaggcgccactaacttctctctgctgaaacaagccggggacgtggaggagaatccaggtcccactagtatggactggatttggcgcatccttttccttgtcggcgctgctaccggcgcgcattccttcgaagaagtgcagctggtggaatcaggcggcggactggtgcagcctggcagaagcctgagactgagctgtgccgccagcggcttcaccttcaacgactacgccatgcactgggtgcgccaggcccctggaaaaggactggaatgggtgtccacaatcagctggaacagcggcagcatcggctacgccgatagcgtgaagggccggttcaccatcagccgggacaacgccaagaagtccctgtacctccagatgaacagcctgcgggccgaggacacagccctgtactattgcgccaaggacatccagtacggcaactactactacggcatggacgtgtggggccagggaaccaccgtgaccgtgtcatctacgcgtgcctctacaaagggaccctccgtgtttcctctggctccctgtagcagaagcaccagcgaatctacagccgctctgggctgcctggtcaaggactactttcctgagcctgtgaccgtgtcctggaacagcggagcactgacatctggcgtgcacacctttccagccgtgctccaaagcagcggcctgtactctctgagcagcgtggtcacagtgcctagctctagcctgggcaccaagacctacacctgtaatgtggaccacaagcctagcaacaccaaggtggacaagcgcgtggaatctaagtacggccctccttgtcctccatgtcctggtaccatccccgaggacacattcttcccaagccccgagagcagctgcgacgtgaagctggtggaaaagagcttcgagacagacaccaacctgaacttccagaacctgagcgtgatcggcttcagaatcctgctgctgaaagtggccggctttaacctgctgatgaccctgcggctgtggtccagccgcgccaagagaagcggatctggcgtgaagcagaccctgaatttcgacctgctgaagctggctggcgacgtggaatccaacccaggcccttctagagccaccatggactggatttggcgcatccttttccttgtcggcgctgctaccggcgcgcattccttcgaagaagtgcagctggtggaatcaggcggcggactggtgcagcctggcagaagcctgagactgagctgtgccgccagcggcttcaccttcaacgactacgccatgcactgggtgcgccaggcccctggaaaaggactggaatgggtgtccacaatcagctggaacagcggcagcatcggctacgccgatagcgtgaagggccggttcaccatcagccgggacaacgccaagaagtccctgtacctccagatgaacagcctgcgggccgaggacacagccctgtactattgcgccaaggacatccagtacggcaactactactacggcatggacgtgtggggccagggaaccaccgtgaccgtgtcatctacgcgtgccagcaccaagggacccagcgttttcccactggctccctgtagcagaagcaccagcgaatctacagccgctctgggctgcctggtcaaggactactttcctgagcctgtgaccgtgtcctggaacagcggagcactgacatctggcgtgcacacctttccagccgtgctgcaaagcagcggcctgtactctctgagcagcgtggtcacagtgccaagctctagcctgggcaccaagacctacacctgtaatgtggaccacaagcctagcaacaccaaggtggacaagcgcgtggaatctaagtacggacctcctgcacctccagcacctggatccggcagagccgattgcggctttaccagcgagagctaccagcagggcgtgctgagcgccaccatcctgtacgagatcctgctgggcaaggccaccctgtacgccgtgctggtgtctgccctggtgctgatggctatggtcaagcggaaggacagccggggataa

SEQ ID NO: 8757 - DNA, 2781 bp, synthetic construct
  source 1..2781: mol_type = other DNA
atggccttaccagtgaccgccttgctcctgccgctggccttgctgctccacgccgccaggccggagatcgtgctgacacagtctcccgccacactgtcactgtctccaggcgaaagagccacactgagctgtagagccagccagagcgtgtcctcttacctggcctggtatcagcagaagcctggacaggctccccggctgctgatctacgatgccagcaatagagccacaggcatccccgccagattttctggctctggcagcggcaccgatttcaccctgaccataagcagcctggaacctgaggacttcgccgtgtactactgccagcagagaagcaactggcccctgacctttggacagggcaccaaggtggaaatcaagagactcgagacagtggccgccccatctgtattcatctttcctccatctgatgaacagcttaagtccggcactgcttctgttgtttgcctgcttaacaatttttacccgcgggaagccaaggtgcaatggaaagtggacaacgccctgcagtctggtaacagtcaggaaagcgtgactgaacaggacagcaaagactccacatactccttgagttccaccttgacgctcagtaaggcagactacgagaagcacaaggtttatgcctgtgaagtgactcaccagggcctctctagcccagtgactaagtccttcaaccgcggggagtgtaggaagcgacgggggtcaggcgccactaacttctctctgctgaaacaagccggggacgtggaggagaatccaggtcccactagtatggactggatttggcgcatccttttccttgtcggcgctgctaccggcgcgcattccttcgaagtgcaactggttcaatcaggtggcggcctggttcaccctggcggatctctgagactgtcttgtaccggcagcggcttcaccttcagctaccacgccatgcactgggtccgacaggcacctggaaaaggactggaatgggtgtccatcatcggcacaggcggcgtgacctactacgccgattctgtgaagggcagattcaccatcagccgggacaacgtgaagaacagcctgtacctccagatgaactccctgagagccgaggatatggccgtgtattattgcgccagagactactacggcgctggcagcttttacgacggcctgtacggaatggatgtgtggggccagggaaccaccgtgactgtctcttctacgcgtgcctctacaaagggaccctccgtgtttcctctggctccctgtagcagaagcaccagcgaatctacagccgctctgggctgcctggtcaaggactactttcctgagcctgtgaccgtgtcctggaacagcggagcactgacatctggcgtgcacacctttccagccgtgctccaaagcagcggcctgtactctctgagcagcgtggtcacagtgcctagctctagcctgggcaccaagacctacacctgtaatgtggaccacaagcctagcaacaccaaggtggacaagcgcgtggaatctaagtacggccctccttgtcctccatgtcctggtaccatccccgaggacacattcttcccaagccccgagagcagctgcgacgtgaagctggtggaaaagagcttcgagacagacaccaacctgaacttccagaacctgagcgtgatcggcttcagaatcctgctgctgaaagtggccggctttaacctgctgatgaccctgcggctgtggtccagccgcgccaagagaagcggatctggcgtgaagcagaccctgaatttcgacctgctgaagctggctggcgacgtggaatccaacccaggcccttctagagccaccatggactggatttggcgcatccttttccttgtcggcgctgctaccggcgcgcattccttcgaacaagttcagctggttcagagcggagccgaagtgaagaaacctggcagcagcgtgaaggtgtcctgcaaagcaagcggcggcacctttagcacctacgccatccactgggttcgacaggcaccaggacaaggactggaatggatgggcagaatcatccccatcgagggcagagcctactacgcccagaaattccagggcagagtgaccatcaccgccgacgagtctacaagcaccgcctacatggaactgagcagcctgagaagcgaggataccgctgtgtactattgcgccagaggccggtacagctacagatattggttcgactactggggccagggcaccctggttacagtctcttctacgcgtgccagcaccaagggacccagcgttttcccactggctccctgtagcagaagcaccagcgaatctacagccgctctgggctgcctggtcaaggactactttcctgagcctgtgaccgtgtcctggaacagcggagcactgacatctggcgtgcacacctttccagccgtgctgcaaagcagcggcctgtactctctgagcagcgtggtcacagtgccaagctctagcctgggcaccaagacctacacctgtaatgtggaccacaagcctagcaacaccaaggtggacaagcgcgtggaatctaagtacggacctcctgcacctccagcacctggatccggcagagccgattgcggctttaccagcgagagctaccagcagggcgtgctgagcgccaccatcctgtacgagatcctgctgggcaaggccaccctgtacgccgtgctggtgtctgccctggtgctgatggctatggtcaagcggaaggacagccggggataa

SEQ ID NO: 8758 - DNA, 2784 bp, synthetic construct
  source 1..2784: mol_type = other DNA
atggccttaccagtgaccgccttgctcctgccgctggccttgctgctccacgccgccaggccggagatcgtgctgacacagtctcccgccacactgtcactgtctccaggcgaaagagccacactgagctgtagagccagccagagcgtgtcctcttacctggcctggtatcagcagaagcctggacaggctccccggctgctgatctacgatgccagcaatagagccacaggcatccccgccagattttctggctctggcagcggcaccgatttcaccctgaccataagcagcctggaacctgaggacttcgccgtgtactactgccagcagagaagcaactggcccctgacctttggacagggcaccaaggtggaaatcaagagactcgagacagtggccgccccatctgtattcatctttcctccatctgatgaacagcttaagtccggcactgcttctgttgtttgcctgcttaacaatttttacccgcgggaagccaaggtgcaatggaaagtggacaacgccctgcagtctggtaacagtcaggaaagcgtgactgaacaggacagcaaagactccacatactccttgagttccaccttgacgctcagtaaggcagactacgagaagcacaaggtttatgcctgtgaagtgactcaccagggcctctctagcccagtgactaagtccttcaaccgcggggagtgtaggaagcgacgggggtcaggcgccactaacttctctctgctgaaacaagccggggacgtggaggagaatccaggtcccactagtatggactggatttggcgcatccttttccttgtcggcgctgctaccggcgcgcattccttcgaagtgcaactggttcaatcaggtggcggcctggttcaccctggcggatctctgagactgtcttgtaccggcagcggcttcaccttcagctaccacgccatgcactgggtccgacaggcacctggaaaaggactggaatgggtgtccatcatcggcacaggcggcgtgacctactacgccgattctgtgaagggcagattcaccatcagccgggacaacgtgaagaacagcctgtacctccagatgaactccctgagagccgaggatatggccgtgtattattgcgccagagactactacggcgctggcagcttttacgacggcctgtacggaatggatgtgtggggccagggaaccaccgtgactgtctcttctacgcgtgcctctacaaagggaccctccgtgtttcctctggctccctgtagcagaagcaccagcgaatctacagccgctctgggctgcctggtcaaggactactttcctgagcctgtgaccgtgtcctggaacagcggagcactgacatctggcgtgcacacctttccagccgtgctccaaagcagcggcctgtactctctgagcagcgtggtcacagtgcctagctctagcctgggcaccaagacctacacctgtaatgtggaccacaagcctagcaacaccaaggtggacaagcgcgtggaatctaagtacggccctccttgtcctccatgtcctggtaccatccccgaggacacattcttcccaagccccgagagcagctgcgacgtgaagctggtggaaaagagcttcgagacagacaccaacctgaacttccagaacctgagcgtgatcggcttcagaatcctgctgctgaaagtggccggctttaacctgctgatgaccctgcggctgtggtccagccgcgccaagagaagcggatctggcgtgaagcagaccctgaatttcgacctgctgaagctggctggcgacgtggaatccaacccaggcccttctagagccaccatggactggatttggcgcatccttttccttgtcggcgctgctaccggcgcgcattccttcgaacaactccaggtgcaggaatctggccccggactcgtgaagcccagcgagacactgagcctgacctgtaccgtgtccggcggcagcatcagcaacagctacttctcctggggctggatcagacagccccctggcaagggcctggaatggatcggcagcttctactacggcgagaaaacctactacaaccccagcctgaagtccagagccaccatcagcatcgacaccagcaagagccagttctccctgaagctgagcagcgtgacagccgccgacaccgccgtgtattattgccccagaggccccaccatgatccggggcgtgatcgactcttggggccagggaacactcgtgaccgtgtcctctacgcgtgccagcaccaagggacccagcgttttcccactggctccctgtagcagaagcaccagcgaatctacagccgctctgggctgcctggtcaaggactactttcctgagcctgtgaccgtgtcctggaacagcggagcactgacatctggcgtgcacacctttccagccgtgctgcaaagcagcggcctgtactctctgagcagcgtggtcacagtgccaagctctagcctgggcaccaagacctacacctgtaatgtggaccacaagcctagcaacaccaaggtggacaagcgcgtggaatctaagtacggacctcctgcacctccagcacctggatccggcagagccgattgcggctttaccagcgagagctaccagcagggcgtgctgagcgccaccatcctgtacgagatcctgctgggcaaggccaccctgtacgccgtgctggtgtctgccctggtgctgatggctatggtcaagcggaaggacagccggggataa

SEQ ID NO: 8759 - DNA, 2775 bp, synthetic construct
  source 1..2775: mol_type = other DNA
atggccttaccagtgaccgccttgctcctgccgctggccttgctgctccacgccgccaggccggacgagatcgtgctgacacagagccctgccaccctgtctctgagccctggcgaaagagccaccctgagctgtagagccagccagagcgtgtccagctacctggcctggtatcagcagaagcccggccaggctccccggctgctgatctacgatgccagcaatagagccaccggcatccccgccagattttccggctctggcagcggcaccgacttcaccctgaccatcagctccctggaacccgaggacttcgccgtgtactactgccagcagcggagcaactggcccatcacattcggccagggcacccggctggaaatcaaactcgagacagtggccgccccatctgtattcatctttcctccatctgatgaacagcttaagtccggcactgcttctgttgtttgcctgcttaacaatttttacccgcgggaagccaaggtgcaatggaaagtggacaacgccctgcagtctggtaacagtcaggaaagcgtgactgaacaggacagcaaagactccacatactccttgagttccaccttgacgctcagtaaggcagactacgagaagcacaaggtttatgcctgtgaagtgactcaccagggcctctctagcccagtgactaagtccttcaaccgcggggagtgtaggaagcgacgggggtcaggcgccactaacttctctctgctgaaacaagccggggacgtggaggagaatccaggtcccactagtatggactggatttggcgcatccttttccttgtcggcgctgctaccggcgcgcattccttcgaagtgcaactggttcaatcaggtggcggcctggttcaccctggcggatctctgagactgtcttgtaccggcagcggcttcaccttcagctaccacgccatgcactgggtccgacaggcacctggaaaaggactggaatgggtgtccatcatcggcacaggcggcgtgacctactacgccgattctgtgaagggcagattcaccatcagccgggacaacgtgaagaacagcctgtacctccagatgaactccctgagagccgaggatatggccgtgtattattgcgccagagactactacggcgctggcagcttttacgacggcctgtacggaatggatgtgtggggccagggaaccaccgtgactgtctcttctacgcgtgcctctacaaagggaccctccgtgtttcctctggctccctgtagcagaagcaccagcgaatctacagccgctctgggctgcctggtcaaggactactttcctgagcctgtgaccgtgtcctggaacagcggagcactgacatctggcgtgcacacctttccagccgtgctccaaagcagcggcctgtactctctgagcagcgtggtcacagtgcctagctctagcctgggcaccaagacctacacctgtaatgtggaccacaagcctagcaacaccaaggtggacaagcgcgtggaatctaagtacggccctccttgtcctccatgtcctggtaccatccccgaggacacattcttcccaagccccgagagcagctgcgacgtgaagctggtggaaaagagcttcgagacagacaccaacctgaacttccagaacctgagcgtgatcggcttcagaatcctgctgctgaaagtggccggctttaacctgctgatgaccctgcggctgtggtccagccgcgccaagagaagcggatctggcgtgaagcagaccctgaatttcgacctgctgaagctggctggcgacgtggaatccaacccaggcccttctagagccaccatggactggatttggcgcatccttttccttgtcggcgctgctaccggcgcgcattccttcgaagttcagctccttgagagtggtggcggcctggttcaacctggcggatctctgagactgtcttgtgccgccagcggcttcacctttagcggctattggatgcactgggtccgacaggcccctggcaaaggacttgaatgggtgtccgccatcagaagcgacggcagcagcaagtactacgccgactctgtgaagggcagattcaccatcagccgggacaacagcaagaacaccctgtacctccagatgaacagcctgagagccgaggacacagccgtgtattattgcgccaaggacggcgtgatcgaggacacctttgattactggggccagggcaccctggtcaccgtttcttctacgcgtgccagcaccaagggacccagcgttttcccactggctccctgtagcagaagcaccagcgaatctacagccgctctgggctgcctggtcaaggactactttcctgagcctgtgaccgtgtcctggaacagcggagcactgacatctggcgtgcacacctttccagccgtgctgcaaagcagcggcctgtactctctgagcagcgtggtcacagtgccaagctctagcctgggcaccaagacctacacctgtaatgtggaccacaagcctagcaacaccaaggtggacaagcgcgtggaatctaagtacggacctcctgcacctccagcacctggatccggcagagccgattgcggctttaccagcgagagctaccagcagggcgtgctgagcgccaccatcctgtacgagatcctgctgggcaaggccaccctgtacgccgtgctggtgtctgccctggtgctgatggctatggtcaagcggaaggacagccggggataa

SEQ ID NO: 8760 - DNA, 2787 bp, synthetic construct
  source 1..2787: mol_type = other DNA
atggccttaccagtgaccgccttgctcctgccgctggccttgctgctccacgccgccaggccggacgagatcgtgctgacacagagccctgccaccctgtctctgagccctggcgaaagagccaccctgagctgtagagccagccagagcgtgtccagctacctggcctggtatcagcagaagcccggccaggctccccggctgctgatctacgatgccagcaatagagccaccggcatccccgccagattttccggctctggcagcggcaccgacttcaccctgaccatcagctccctggaacccgaggacttcgccgtgtactactgccagcagcggagcaactggcccatcacattcggccagggcacccggctggaaatcaaactcgagacagtggccgccccatctgtattcatctttcctccatctgatgaacagcttaagtccggcactgcttctgttgtttgcctgcttaacaatttttacccgcgggaagccaaggtgcaatggaaagtggacaacgccctgcagtctggtaacagtcaggaaagcgtgactgaacaggacagcaaagactccacatactccttgagttccaccttgacgctcagtaaggcagactacgagaagcacaaggtttatgcctgtgaagtgactcaccagggcctctctagcccagtgactaagtccttcaaccgcggggagtgtaggaagcgacgggggtcaggcgccactaacttctctctgctgaaacaagccggggacgtggaggagaatccaggtcccactagtatggactggatttggcgcatccttttccttgtcggcgctgctaccggcgcgcattccttcgaagtgcaactggttcaatcaggtggcggcctggttcaccctggcggatctctgagactgtcttgtaccggcagcggcttcaccttcagctaccacgccatgcactgggtccgacaggcacctggaaaaggactggaatgggtgtccatcatcggcacaggcggcgtgacctactacgccgattctgtgaagggcagattcaccatcagccgggacaacgtgaagaacagcctgtacctccagatgaactccctgagagccgaggatatggccgtgtattattgcgccagagactactacggcgctggcagcttttacgacggcctgtacggaatggatgtgtggggccagggaaccaccgtgactgtctcttctacgcgtgcctctacaaagggaccctccgtgtttcctctggctccctgtagcagaagcaccagcgaatctacagccgctctgggctgcctggtcaaggactactttcctgagcctgtgaccgtgtcctggaacagcggagcactgacatctggcgtgcacacctttccagccgtgctccaaagcagcggcctgtactctctgagcagcgtggtcacagtgcctagctctagcctgggcaccaagacctacacctgtaatgtggaccacaagcctagcaacaccaaggtggacaagcgcgtggaatctaagtacggccctccttgtcctccatgtcctggtaccatccccgaggacacattcttcccaagccccgagagcagctgcgacgtgaagctggtggaaaagagcttcgagacagacaccaacctgaacttccagaacctgagcgtgatcggcttcagaatcctgctgctgaaagtggccggctttaacctgctgatgaccctgcggctgtggtccagccgcgccaagagaagcggatctggcgtgaagcagaccctgaatttcgacctgctgaagctggctggcgacgtggaatccaacccaggcccttctagagccaccatggactggatttggcgcatccttttccttgtcggcgctgctaccggcgcgcattccttcgaagaagtgcagctggtggaatcaggcggcggactggtgcagcctggcagaagcctgagactgagctgtgccgccagcggcttcaccttcaacgactacgccatgcactgggtgcgccaggcccctggaaaaggactggaatgggtgtccacaatcagctggaacagcggcagcatcggctacgccgatagcgtgaagggccggttcaccatcagccgggacaacgccaagaagtccctgtacctccagatgaacagcctgcgggccgaggacacagccctgtactattgcgccaaggacatccagtacggcaactactactacggcatggacgtgtggggccagggaaccaccgtgaccgtgtcatctacgcgtgccagcaccaagggacccagcgttttcccactggctccctgtagcagaagcaccagcgaatctacagccgctctgggctgcctggtcaaggactactttcctgagcctgtgaccgtgtcctggaacagcggagcactgacatctggcgtgcacacctttccagccgtgctgcaaagcagcggcctgtactctctgagcagcgtggtcacagtgccaagctctagcctgggcaccaagacctacacctgtaatgtggaccacaagcctagcaacaccaaggtggacaagcgcgtggaatctaagtacggacctcctgcacctccagcacctggatccggcagagccgattgcggctttaccagcgagagctaccagcagggcgtgctgagcgccaccatcctgtacgagatcctgctgggcaaggccaccctgtacgccgtgctggtgtctgccctggtgctgatggctatggtcaagcggaaggacagccggggataa

SEQ ID NO: 8761 - DNA, 2781 bp, synthetic construct
  source 1..2781: mol_type = other DNA
atggccttaccagtgaccgccttgctcctgccgctggccttgctgctccacgccgccaggccggacgagatcgtgctgacacagagccctgccaccctgtctctgagccctggcgaaagagccaccctgagctgtagagccagccagagcgtgtccagctacctggcctggtatcagcagaagcccggccaggctccccggctgctgatctacgatgccagcaatagagccaccggcatccccgccagattttccggctctggcagcggcaccgacttcaccctgaccatcagctccctggaacccgaggacttcgccgtgtactactgccagcagcggagcaactggcccatcacattcggccagggcacccggctggaaatcaaactcgagacagtggccgccccatctgtattcatctttcctccatctgatgaacagcttaagtccggcactgcttctgttgtttgcctgcttaacaatttttacccgcgggaagccaaggtgcaatggaaagtggacaacgccctgcagtctggtaacagtcaggaaagcgtgactgaacaggacagcaaagactccacatactccttgagttccaccttgacgctcagtaaggcagactacgagaagcacaaggtttatgcctgtgaagtgactcaccagggcctctctagcccagtgactaagtccttcaaccgcggggagtgtaggaagcgacgggggtcaggcgccactaacttctctctgctgaaacaagccggggacgtggaggagaatccaggtcccactagtatggactggatttggcgcatccttttccttgtcggcgctgctaccggcgcgcattccttcgaagtgcaactggttcaatcaggtggcggcctggttcaccctggcggatctctgagactgtcttgtaccggcagcggcttcaccttcagctaccacgccatgcactgggtccgacaggcacctggaaaaggactggaatgggtgtccatcatcggcacaggcggcgtgacctactacgccgattctgtgaagggcagattcaccatcagccgggacaacgtgaagaacagcctgtacctccagatgaactccctgagagccgaggatatggccgtgtattattgcgccagagactactacggcgctggcagcttttacgacggcctgtacggaatggatgtgtggggccagggaaccaccgtgactgtctcttctacgcgtgcctctacaaagggaccctccgtgtttcctctggctccctgtagcagaagcaccagcgaatctacagccgctctgggctgcctggtcaaggactactttcctgagcctgtgaccgtgtcctggaacagcggagcactgacatctggcgtgcacacctttccagccgtgctccaaagcagcggcctgtactctctgagcagcgtggtcacagtgcctagctctagcctgggcaccaagacctacacctgtaatgtggaccacaagcctagcaacaccaaggtggacaagcgcgtggaatctaagtacggccctccttgtcctccatgtcctggtaccatccccgaggacacattcttcccaagccccgagagcagctgcgacgtgaagctggtggaaaagagcttcgagacagacaccaacctgaacttccagaacctgagcgtgatcggcttcagaatcctgctgctgaaagtggccggctttaacctgctgatgaccctgcggctgtggtccagccgcgccaagagaagcggatctggcgtgaagcagaccctgaatttcgacctgctgaagctggctggcgacgtggaatccaacccaggcccttctagagccaccatggactggatttggcgcatccttttccttgtcggcgctgctaccggcgcgcattccttcgaacaagttcagctggttcagagcggagccgaagtgaagaaacctggcagcagcgtgaaggtgtcctgcaaagcaagcggcggcacctttagcacctacgccatccactgggttcgacaggcaccaggacaaggactggaatggatgggcagaatcatccccatcgagggcagagcctactacgcccagaaattccagggcagagtgaccatcaccgccgacgagtctacaagcaccgcctacatggaactgagcagcctgagaagcgaggataccgctgtgtactattgcgccagaggccggtacagctacagatattggttcgactactggggccagggcaccctggttacagtctcttctacgcgtgccagcaccaagggacccagcgttttcccactggctccctgtagcagaagcaccagcgaatctacagccgctctgggctgcctggtcaaggactactttcctgagcctgtgaccgtgtcctggaacagcggagcactgacatctggcgtgcacacctttccagccgtgctgcaaagcagcggcctgtactctctgagcagcgtggtcacagtgccaagctctagcctgggcaccaagacctacacctgtaatgtggaccacaagcctagcaacaccaaggtggacaagcgcgtggaatctaagtacggacctcctgcacctccagcacctggatccggcagagccgattgcggctttaccagcgagagctaccagcagggcgtgctgagcgccaccatcctgtacgagatcctgctgggcaaggccaccctgtacgccgtgctggtgtctgccctggtgctgatggctatggtcaagcggaaggacagccggggataa

SEQ ID NO: 8762 - DNA, 2772 bp, synthetic construct
  source 1..2772: mol_type = other DNA
atggccttaccagtgaccgccttgctcctgccgctggccttgctgctccacgccgccaggccggacatccagatgacacagagccctagcagcctgtctgccagcgtgggagacagagtgaccatcacatgcaaggccagcgaccacatcaacaactggctggcctggtatcagcagaagcctggcaaggcccctaagctgctgatctacggcgctaccacactggaaacaggcgtgcccagcagattttctggcagcggctctggcaccgacttcaccctgacaatatccagcctccagcctgaggacttcgccacctactactgtcagcagagctggaacaccccttggacattcggccagggcaccaaggtggaaatcaagagactcgagacagtggccgccccatctgtattcatctttcctccatctgatgaacagcttaagtccggcactgcttctgttgtttgcctgcttaacaatttttacccgcgggaagccaaggtgcaatggaaagtggacaacgccctgcagtctggtaacagtcaggaaagcgtgactgaacaggacagcaaagactccacatactccttgagttccaccttgacgctcagtaaggcagactacgagaagcacaaggtttatgcctgtgaagtgactcaccagggcctctctagcccagtgactaagtccttcaaccgcggggagtgtaggaagcgacgggggtcaggcgccactaacttctctctgctgaaacaagccggggacgtggaggagaatccaggtcccactagtatggactggatttggcgcatccttttccttgtcggcgctgctaccggcgcgcattccttcgaagttcagctggttgaatctggcggcggactggttcaacctggcggatctctgagactgagctgtgccgcctctggctacgcctttagcagctactgggtcaactgggttcgacaggcccctggcaaaggactggaatgggtcgcccaaatctatcccggcgacggcgacaccaactacaacggcaagttcaagggcagattcaccatcagccgggacaacagcaagaacaccctgtacctccagatgaactccctgagagccgaggacaccgccgtgtactattgtgccagatccatcaccaccgtcgtgggctgcgctatggattattggggccagggaaccctggtcaccgtgtcctctacgcgtgcctctacaaagggaccctccgtgtttcctctggctccctgtagcagaagcaccagcgaatctacagccgctctgggctgcctggtcaaggactactttcctgagcctgtgaccgtgtcctggaacagcggagcactgacatctggcgtgcacacctttccagccgtgctccaaagcagcggcctgtactctctgagcagcgtggtcacagtgcctagctctagcctgggcaccaagacctacacctgtaatgtggaccacaagcctagcaacaccaaggtggacaagcgcgtggaatctaagtacggccctccttgtcctccatgtcctggtaccatccccgaggacacattcttcccaagccccgagagcagctgcgacgtgaagctggtggaaaagagcttcgagacagacaccaacctgaacttccagaacctgagcgtgatcggcttcagaatcctgctgctgaaagtggccggctttaacctgctgatgaccctgcggctgtggtccagccgcgccaagagaagcggatctggcgtgaagcagaccctgaatttcgacctgctgaagctggctggcgacgtggaatccaacccaggcccttctagagccaccatggactggatttggcgcatccttttccttgtcggcgctgctaccggcgcgcattccttcgaacaggttcagctccagcagtctggcgctgagcttgctagacctggcgcttctgtgaagctgagctgcaaggccagcggctacaccttcaccagctactggatgcagtgggtcaagcagaggccaggccaaggactggaatggatcggagccatctatcccggcgacggcgataccagatacacccagaagttcaagggcaaagccacactgaccgccgacaagagcagctccacagcctacatgcaactgagcagcctggcttccgaggacagcgccgtgtactattgtgccagaggcaaggtgtactacggcagcaaccctttcgcctattggggccagggaaccctggttacagtgtctgctacgcgtgccagcaccaagggacccagcgttttcccactggctccctgtagcagaagcaccagcgaatctacagccgctctgggctgcctggtcaaggactactttcctgagcctgtgaccgtgtcctggaacagcggagcactgacatctggcgtgcacacctttccagccgtgctgcaaagcagcggcctgtactctctgagcagcgtggtcacagtgccaagctctagcctgggcaccaagacctacacctgtaatgtggaccacaagcctagcaacaccaaggtggacaagcgcgtggaatctaagtacggacctcctgcacctccagcacctggatccggcagagccgattgcggctttaccagcgagagctaccagcagggcgtgctgagcgccaccatcctgtacgagatcctgctgggcaaggccaccctgtacgccgtgctggtgtctgccctggtgctgatggctatggtcaagcggaaggacagccggggataa

SEQ ID NO: 8763 - DNA, 2871 bp, synthetic construct
  source 1..2871: mol_type = other DNA
atggccttaccagtgaccgccttgctcctgccgctggccttgctgctccacgccgccaggccggcatgcgctagaagcgaagatcggtatcggaaccccaagggtaccggcggaggcggatctggcggcggaggtagcggtggcggaggatctgaattcgacatccagatgacacagagccctagcagcctgtctgccagcgtgggagacagagtgaccatcacatgcaaggccagcgaccacatcaacaactggctggcctggtatcagcagaagcctggacaggcccctaagctgctgatctacggcgctaccacactggaaacaggcgtgcccagcagattttctggcagcggctctggcaccgactacaccctgacaatatccagcctccagcctgaggacttcgccacctactactgtcagcagagctggaacaccccttggacattcggccagggcaccaagctggaaatcaagagactcgagacagtggccgccccatctgtattcatctttcctccatctgatgaacagcttaagtccggcactgcttctgttgtttgcctgcttaacaatttttacccgcgggaagccaaggtgcaatggaaagtggacaacgccctgcagtctggtaacagtcaggaaagcgtgactgaacaggacagcaaagactccacatactccttgagttccaccttgacgctcagtaaggcagactacgagaagcacaaggtttatgcctgtgaagtgactcaccagggcctctctagcccagtgactaagtccttcaaccgcggggagtgtaggaagcgacgggggtcaggcgccactaacttctctctgctgaaacaagccggggacgtggaggagaatccaggtcccactagtatggactggatttggcgcatccttttccttgtcggcgctgctaccggcgcgcattccttcgaacaagttcagcttcaacagcctggcgctgagctggtcaaacctggcgcttctgtgaagatgagctgcaaagccagcggctacgccttcagcagctactggatcaactggatgaagcagaaacccggccagggactcgaatggatcggccaaatctatcccggcgacggcgacaccaactacaacggcaagttcaagggcagagccacactgaccgccgatacctctagcagcacagcctacatgcagctgagcagcctgaccagcgaagatagcgccgtgtacttctgtgcccggtccatcacaacagtcgtgggctgcgctatggactattggggccagggaacaagcgtgaccgtgtctagtacgcgtgcctctacaaagggaccctccgtgtttcctctggctccctgtagcagaagcaccagcgaatctacagccgctctgggctgcctggtcaaggactactttcctgagcctgtgaccgtgtcctggaacagcggagcactgacatctggcgtgcacacctttccagccgtgctccaaagcagcggcctgtactctctgagcagcgtggtcacagtgcctagctctagcctgggcaccaagacctacacctgtaatgtggaccacaagcctagcaacaccaaggtggacaagcgcgtggaatctaagtacggccctccttgtcctccatgtcctggtaccatccccgaggacacattcttcccaagccccgagagcagctgcgacgtgaagctggtggaaaagagcttcgagacagacaccaacctgaacttccagaacctgagcgtgatcggcttcagaatcctgctgctgaaagtggccggctttaacctgctgatgaccctgcggctgtggtccagccgcgccaagagaagcggatctggcgtgaagcagaccctgaatttcgacctgctgaagctggctggcgacgtggaatccaacccaggcccttctagagccaccatggactggatttggcgcatccttttccttgtcggcgctgctaccggcgcgcattccttcgaacaggttcagctccagcagtctggcgctgagcttgctagacctggcgcttctgtgaagctgagctgcaaggccagcggctacaccttcaccagctactggatgcagtgggtcaagcagaggccaggccaaggactggaatggatcggagccatctatcccggcgacggcgataccagatacacccagaagttcaagggcaaagccacactgaccgccgacaagagcagctccacagcctacatgcaactgagcagcctggcttccgaggacagcgccgtgtactattgtgccagaggcaaggtgtactacggcagcaaccctttcgcctattggggccagggaaccctggttacagtgtctgctacgcgtgccagcaccaagggacccagcgttttcccactggctccctgtagcagaagcaccagcgaatctacagccgctctgggctgcctggtcaaggactactttcctgagcctgtgaccgtgtcctggaacagcggagcactgacatctggcgtgcacacctttccagccgtgctgcaaagcagcggcctgtactctctgagcagcgtggtcacagtgccaagctctagcctgggcaccaagacctacacctgtaatgtggaccacaagcctagcaacaccaaggtggacaagcgcgtggaatctaagtacggacctcctgcacctccagcacctggatccggcagagccgattgcggctttaccagcgagagctaccagcagggcgtgctgagcgccaccatcctgtacgagatcctgctgggcaaggccaccctgtacgccgtgctggtgtctgccctggtgctgatggctatggtcaagcggaaggacagccggggataa

SEQ ID NO: 8764 - DNA, 2769 bp, synthetic construct
  source 1..2769: mol_type = other DNA
atggccttaccagtgaccgccttgctcctgccgctggccttgctgctccacgccgccaggccggacgagatcgtgctgacacagagccctgccaccctgtctctgagccctggcgaaagagccaccctgagctgtagagccagccagagcgtgtccagctacctggcctggtatcagcagaagcccggccaggctccccggctgctgatctacgatgccagcaatagagccaccggcatccccgccagattttccggctctggcagcggcaccgacttcaccctgaccatcagctccctggaacccgaggacttcgccgtgtactactgccagcagcggagcaactggcccatcacattcggccagggcacccggctggaaatcaaactcgagacagtggccgccccatctgtattcatctttcctccatctgatgaacagcttaagtccggcactgcttctgttgtttgcctgcttaacaatttttacccgcgggaagccaaggtgcaatggaaagtggacaacgccctgcagtctggtaacagtcaggaaagcgtgactgaacaggacagcaaagactccacatactccttgagttccaccttgacgctcagtaaggcagactacgagaagcacaaggtttatgcctgtgaagtgactcaccagggcctctctagcccagtgactaagtccttcaaccgcggggagtgtaggaagcgacgggggtcaggcgccactaacttctctctgctgaaacaagccggggacgtggaggagaatccaggtcccactagtatggactggatttggcgcatccttttccttgtcggcgctgctaccggcgcgcattccttcgaagaagtgcagctggtggaatcaggcggcggactggtgcagcctggcagaagcctgagactgagctgtgccgccagcggcttcaccttcaacgactacgccatgcactgggtgcgccaggcccctggaaaaggactggaatgggtgtccacaatcagctggaacagcggcagcatcggctacgccgatagcgtgaagggccggttcaccatcagccgggacaacgccaagaagtccctgtacctccagatgaacagcctgcgggccgaggacacagccctgtactattgcgccaaggacatccagtacggcaactactactacggcatggacgtgtggggccagggaaccaccgtgaccgtgtcatctacgcgtgcctctacaaagggaccctccgtgtttcctctggctccctgtagcagaagcaccagcgaatctacagccgctctgggctgcctggtcaaggactactttcctgagcctgtgaccgtgtcctggaacagcggagcactgacatctggcgtgcacacctttccagccgtgctccaaagcagcggcctgtactctctgagcagcgtggtcacagtgcctagctctagcctgggcaccaagacctacacctgtaatgtggaccacaagcctagcaacaccaaggtggacaagcgcgtggaatctaagtacggccctccttgtcctccatgtcctggtaccatccccgaggacacattcttcccaagccccgagagcagctgcgacgtgaagctggtggaaaagagcttcgagacagacaccaacctgaacttccagaacctgagcgtgatcggcttcagaatcctgctgctgaaagtggccggctttaacctgctgatgaccctgcggctgtggtccagccgcgccaagagaagcggatctggcgtgaagcagaccctgaatttcgacctgctgaagctggctggcgacgtggaatccaacccaggcccttctagagccaccatggactggatttggcgcatccttttccttgtcggcgctgctaccggcgcgcattccttcgaagttcagctccttgagagtggtggcggcctggttcaacctggcggatctctgagactgtcttgtgccgccagcggcttcacctttagcggctattggatgcactgggtccgacaggcccctggcaaaggacttgaatgggtgtccgccatcagaagcgacggcagcagcaagtactacgccgactctgtgaagggcagattcaccatcagccgggacaacagcaagaacaccctgtacctccagatgaacagcctgagagccgaggacacagccgtgtattattgcgccaaggacggcgtgatcgaggacacctttgattactggggccagggcaccctggtcaccgtttcttctacgcgtgccagcaccaagggacccagcgttttcccactggctccctgtagcagaagcaccagcgaatctacagccgctctgggctgcctggtcaaggactactttcctgagcctgtgaccgtgtcctggaacagcggagcactgacatctggcgtgcacacctttccagccgtgctgcaaagcagcggcctgtactctctgagcagcgtggtcacagtgccaagctctagcctgggcaccaagacctacacctgtaatgtggaccacaagcctagcaacaccaaggtggacaagcgcgtggaatctaagtacggacctcctgcacctccagcacctggatccggcagagccgattgcggctttaccagcgagagctaccagcagggcgtgctgagcgccaccatcctgtacgagatcctgctgggcaaggccaccctgtacgccgtgctggtgtctgccctggtgctgatggctatggtcaagcggaaggacagccggggataa

SEQ ID NO: 8765 - DNA, 2781 bp, synthetic construct
  source 1..2781: mol_type = other DNA
atggccttaccagtgaccgccttgctcctgccgctggccttgctgctccacgccgccaggccggacgagatcgtgctgacacagagccctgccaccctgtctctgagccctggcgaaagagccaccctgagctgtagagccagccagagcgtgtccagctacctggcctggtatcagcagaagcccggccaggctccccggctgctgatctacgatgccagcaatagagccaccggcatccccgccagattttccggctctggcagcggcaccgacttcaccctgaccatcagctccctggaacccgaggacttcgccgtgtactactgccagcagcggagcaactggcccatcacattcggccagggcacccggctggaaatcaaactcgagacagtggccgccccatctgtattcatctttcctccatctgatgaacagcttaagtccggcactgcttctgttgtttgcctgcttaacaatttttacccgcgggaagccaaggtgcaatggaaagtggacaacgccctgcagtctggtaacagtcaggaaagcgtgactgaacaggacagcaaagactccacatactccttgagttccaccttgacgctcagtaaggcagactacgagaagcacaaggtttatgcctgtgaagtgactcaccagggcctctctagcccagtgactaagtccttcaaccgcggggagtgtaggaagcgacgggggtcaggcgccactaacttctctctgctgaaacaagccggggacgtggaggagaatccaggtcccactagtatggactggatttggcgcatccttttccttgtcggcgctgctaccggcgcgcattccttcgaagaagtgcagctggtggaatcaggcggcggactggtgcagcctggcagaagcctgagactgagctgtgccgccagcggcttcaccttcaacgactacgccatgcactgggtgcgccaggcccctggaaaaggactggaatgggtgtccacaatcagctggaacagcggcagcatcggctacgccgatagcgtgaagggccggttcaccatcagccgggacaacgccaagaagtccctgtacctccagatgaacagcctgcgggccgaggacacagccctgtactattgcgccaaggacatccagtacggcaactactactacggcatggacgtgtggggccagggaaccaccgtgaccgtgtcatctacgcgtgcctctacaaagggaccctccgtgtttcctctggctccctgtagcagaagcaccagcgaatctacagccgctctgggctgcctggtcaaggactactttcctgagcctgtgaccgtgtcctggaacagcggagcactgacatctggcgtgcacacctttccagccgtgctccaaagcagcggcctgtactctctgagcagcgtggtcacagtgcctagctctagcctgggcaccaagacctacacctgtaatgtggaccacaagcctagcaacaccaaggtggacaagcgcgtggaatctaagtacggccctccttgtcctccatgtcctggtaccatccccgaggacacattcttcccaagccccgagagcagctgcgacgtgaagctggtggaaaagagcttcgagacagacaccaacctgaacttccagaacctgagcgtgatcggcttcagaatcctgctgctgaaagtggccggctttaacctgctgatgaccctgcggctgtggtccagccgcgccaagagaagcggatctggcgtgaagcagaccctgaatttcgacctgctgaagctggctggcgacgtggaatccaacccaggcccttctagagccaccatggactggatttggcgcatccttttccttgtcggcgctgctaccggcgcgcattccttcgaagaagtgcagctggtggaatcaggcggcggactggtgcagcctggcagaagcctgagactgagctgtgccgccagcggcttcaccttcaacgactacgccatgcactgggtgcgccaggcccctggaaaaggactggaatgggtgtccacaatcagctggaacagcggcagcatcggctacgccgatagcgtgaagggccggttcaccatcagccgggacaacgccaagaagtccctgtacctccagatgaacagcctgcgggccgaggacacagccctgtactattgcgccaaggacatccagtacggcaactactactacggcatggacgtgtggggccagggaaccaccgtgaccgtgtcatctacgcgtgccagcaccaagggacccagcgttttcccactggctccctgtagcagaagcaccagcgaatctacagccgctctgggctgcctggtcaaggactactttcctgagcctgtgaccgtgtcctggaacagcggagcactgacatctggcgtgcacacctttccagccgtgctgcaaagcagcggcctgtactctctgagcagcgtggtcacagtgccaagctctagcctgggcaccaagacctacacctgtaatgtggaccacaagcctagcaacaccaaggtggacaagcgcgtggaatctaagtacggacctcctgcacctccagcacctggatccggcagagccgattgcggctttaccagcgagagctaccagcagggcgtgctgagcgccaccatcctgtacgagatcctgctgggcaaggccaccctgtacgccgtgctggtgtctgccctggtgctgatggctatggtcaagcggaaggacagccggggataa

SEQ ID NO: 8766 - DNA, 2775 bp, synthetic construct
  source 1..2775: mol_type = other DNA
atggccttaccagtgaccgccttgctcctgccgctggccttgctgctccacgccgccaggccggacgagatcgtgctgacacagagccctgccaccctgtctctgagccctggcgaaagagccaccctgagctgtagagccagccagagcgtgtccagctacctggcctggtatcagcagaagcccggccaggctccccggctgctgatctacgatgccagcaatagagccaccggcatccccgccagattttccggctctggcagcggcaccgacttcaccctgaccatcagctccctggaacccgaggacttcgccgtgtactactgccagcagcggagcaactggcccatcacattcggccagggcacccggctggaaatcaaactcgagacagtggccgccccatctgtattcatctttcctccatctgatgaacagcttaagtccggcactgcttctgttgtttgcctgcttaacaatttttacccgcgggaagccaaggtgcaatggaaagtggacaacgccctgcagtctggtaacagtcaggaaagcgtgactgaacaggacagcaaagactccacatactccttgagttccaccttgacgctcagtaaggcagactacgagaagcacaaggtttatgcctgtgaagtgactcaccagggcctctctagcccagtgactaagtccttcaaccgcggggagtgtaggaagcgacgggggtcaggcgccactaacttctctctgctgaaacaagccggggacgtggaggagaatccaggtcccactagtatggactggatttggcgcatccttttccttgtcggcgctgctaccggcgcgcattccttcgaagaagtgcagctggtggaatcaggcggcggactggtgcagcctggcagaagcctgagactgagctgtgccgccagcggcttcaccttcaacgactacgccatgcactgggtgcgccaggcccctggaaaaggactggaatgggtgtccacaatcagctggaacagcggcagcatcggctacgccgatagcgtgaagggccggttcaccatcagccgggacaacgccaagaagtccctgtacctccagatgaacagcctgcgggccgaggacacagccctgtactattgcgccaaggacatccagtacggcaactactactacggcatggacgtgtggggccagggaaccaccgtgaccgtgtcatctacgcgtgcctctacaaagggaccctccgtgtttcctctggctccctgtagcagaagcaccagcgaatctacagccgctctgggctgcctggtcaaggactactttcctgagcctgtgaccgtgtcctggaacagcggagcactgacatctggcgtgcacacctttccagccgtgctccaaagcagcggcctgtactctctgagcagcgtggtcacagtgcctagctctagcctgggcaccaagacctacacctgtaatgtggaccacaagcctagcaacaccaaggtggacaagcgcgtggaatctaagtacggccctccttgtcctccatgtcctggtaccatccccgaggacacattcttcccaagccccgagagcagctgcgacgtgaagctggtggaaaagagcttcgagacagacaccaacctgaacttccagaacctgagcgtgatcggcttcagaatcctgctgctgaaagtggccggctttaacctgctgatgaccctgcggctgtggtccagccgcgccaagagaagcggatctggcgtgaagcagaccctgaatttcgacctgctgaagctggctggcgacgtggaatccaacccaggcccttctagagccaccatggactggatttggcgcatccttttccttgtcggcgctgctaccggcgcgcattccttcgaacaagttcagctggttcagagcggagccgaagtgaagaaacctggcagcagcgtgaaggtgtcctgcaaagcaagcggcggcacctttagcacctacgccatccactgggttcgacaggcaccaggacaaggactggaatggatgggcagaatcatccccatcgagggcagagcctactacgcccagaaattccagggcagagtgaccatcaccgccgacgagtctacaagcaccgcctacatggaactgagcagcctgagaagcgaggataccgctgtgtactattgcgccagaggccggtacagctacagatattggttcgactactggggccagggcaccctggttacagtctcttctacgcgtgccagcaccaagggacccagcgttttcccactggctccctgtagcagaagcaccagcgaatctacagccgctctgggctgcctggtcaaggactactttcctgagcctgtgaccgtgtcctggaacagcggagcactgacatctggcgtgcacacctttccagccgtgctgcaaagcagcggcctgtactctctgagcagcgtggtcacagtgccaagctctagcctgggcaccaagacctacacctgtaatgtggaccacaagcctagcaacaccaaggtggacaagcgcgtggaatctaagtacggacctcctgcacctccagcacctggatccggcagagccgattgcggctttaccagcgagagctaccagcagggcgtgctgagcgccaccatcctgtacgagatcctgctgggcaaggccaccctgtacgccgtgctggtgtctgccctggtgctgatggctatggtcaagcggaaggacagccggggataa

SEQ ID NO: 8767 - DNA, 2778 bp, synthetic construct
  source 1..2778: mol_type = other DNA
atggccttaccagtgaccgccttgctcctgccgctggccttgctgctccacgccgccaggccggacgagatcgtgctgacacagagccctgccaccctgtctctgagccctggcgaaagagccaccctgagctgtagagccagccagagcgtgtccagctacctggcctggtatcagcagaagcccggccaggctccccggctgctgatctacgatgccagcaatagagccaccggcatccccgccagattttccggctctggcagcggcaccgacttcaccctgaccatcagctccctggaacccgaggacttcgccgtgtactactgccagcagcggagcaactggcccatcacattcggccagggcacccggctggaaatcaaactcgagacagtggccgccccatctgtattcatctttcctccatctgatgaacagcttaagtccggcactgcttctgttgtttgcctgcttaacaatttttacccgcgggaagccaaggtgcaatggaaagtggacaacgccctgcagtctggtaacagtcaggaaagcgtgactgaacaggacagcaaagactccacatactccttgagttccaccttgacgctcagtaaggcagactacgagaagcacaaggtttatgcctgtgaagtgactcaccagggcctctctagcccagtgactaagtccttcaaccgcggggagtgtaggaagcgacgggggtcaggcgccactaacttctctctgctgaaacaagccggggacgtggaggagaatccaggtcccactagtatggactggatttggcgcatccttttccttgtcggcgctgctaccggcgcgcattccttcgaagaagtgcagctggtggaatcaggcggcggactggtgcagcctggcagaagcctgagactgagctgtgccgccagcggcttcaccttcaacgactacgccatgcactgggtgcgccaggcccctggaaaaggactggaatgggtgtccacaatcagctggaacagcggcagcatcggctacgccgatagcgtgaagggccggttcaccatcagccgggacaacgccaagaagtccctgtacctccagatgaacagcctgcgggccgaggacacagccctgtactattgcgccaaggacatccagtacggcaactactactacggcatggacgtgtggggccagggaaccaccgtgaccgtgtcatctacgcgtgcctctacaaagggaccctccgtgtttcctctggctccctgtagcagaagcaccagcgaatctacagccgctctgggctgcctggtcaaggactactttcctgagcctgtgaccgtgtcctggaacagcggagcactgacatctggcgtgcacacctttccagccgtgctccaaagcagcggcctgtactctctgagcagcgtggtcacagtgcctagctctagcctgggcaccaagacctacacctgtaatgtggaccacaagcctagcaacaccaaggtggacaagcgcgtggaatctaagtacggccctccttgtcctccatgtcctggtaccatccccgaggacacattcttcccaagccccgagagcagctgcgacgtgaagctggtggaaaagagcttcgagacagacaccaacctgaacttccagaacctgagcgtgatcggcttcagaatcctgctgctgaaagtggccggctttaacctgctgatgaccctgcggctgtggtccagccgcgccaagagaagcggatctggcgtgaagcagaccctgaatttcgacctgctgaagctggctggcgacgtggaatccaacccaggcccttctagagccaccatggactggatttggcgcatccttttccttgtcggcgctgctaccggcgcgcattccttcgaacaactccaggtgcaggaatctggccccggactcgtgaagcccagcgagacactgagcctgacctgtaccgtgtccggcggcagcatcagcaacagctacttctcctggggctggatcagacagccccctggcaagggcctggaatggatcggcagcttctactacggcgagaaaacctactacaaccccagcctgaagtccagagccaccatcagcatcgacaccagcaagagccagttctccctgaagctgagcagcgtgacagccgccgacaccgccgtgtattattgccccagaggccccaccatgatccggggcgtgatcgactcttggggccagggaacactcgtgaccgtgtcctctacgcgtgccagcaccaagggacccagcgttttcccactggctccctgtagcagaagcaccagcgaatctacagccgctctgggctgcctggtcaaggactactttcctgagcctgtgaccgtgtcctggaacagcggagcactgacatctggcgtgcacacctttccagccgtgctgcaaagcagcggcctgtactctctgagcagcgtggtcacagtgccaagctctagcctgggcaccaagacctacacctgtaatgtggaccacaagcctagcaacaccaaggtggacaagcgcgtggaatctaagtacggacctcctgcacctccagcacctggatccggcagagccgattgcggctttaccagcgagagctaccagcagggcgtgctgagcgccaccatcctgtacgagatcctgctgggcaaggccaccctgtacgccgtgctggtgtctgccctggtgctgatggctatggtcaagcggaaggacagccggggataa

SEQ ID NO: 8768 - DNA, 2772 bp, synthetic construct
  source 1..2772: mol_type = other DNA
atggccttaccagtgaccgccttgctcctgccgctggccttgctgctccacgccgccaggccggagatcgtgctgacacagtctcccgccacactgtcactgtctccaggcgaaagagccacactgagctgtagagccagccagagcgtgtcctcttacctggcctggtatcagcagaagcctggacaggctccccggctgctgatctacgatgccagcaatagagccacaggcatccccgccagattttctggctctggcagcggcaccgatttcaccctgaccataagcagcctggaacctgaggacttcgccgtgtactactgccagcagagaagcaactggcccctgacctttggacagggcaccaaggtggaaatcaaactcgagacagtggccgccccatctgtattcatctttcctccatctgatgaacagcttaagtccggcactgcttctgttgtttgcctgcttaacaatttttacccgcgggaagccaaggtgcaatggaaagtggacaacgccctgcagtctggtaacagtcaggaaagcgtgactgaacaggacagcaaagactccacatactccttgagttccaccttgacgctcagtaaggcagactacgagaagcacaaggtttatgcctgtgaagtgactcaccagggcctctctagcccagtgactaagtccttcaaccgcggggagtgtaggaagcgacgggggtcaggcgccactaacttctctctgctgaaacaagccggggacgtggaggagaatccaggtcccactagtatggactggatttggcgcatccttttccttgtcggcgctgctaccggcgcgcattccttcgaagtgcaactggttcaatcaggtggcggcctggttcaccctggcggatctctgagactgtcttgtaccggcagcggcttcaccttcagctaccacgccatgcactgggtccgacaggcacctggaaaaggactggaatgggtgtccatcatcggcacaggcggcgtgacctactacgccgattctgtgaagggcagattcaccatcagccgggacaacgtgaagaacagcctgtacctccagatgaactccctgagagccgaggatatggccgtgtattattgcgccagagactactacggcgctggcagcttttacgacggcctgtacggaatggatgtgtggggccagggaaccaccgtgactgtctcttctacgcgtgcctctacaaagggaccctccgtgtttcctctggctccctgtagcagaagcaccagcgaatctacagccgctctgggctgcctggtcaaggactactttcctgagcctgtgaccgtgtcctggaacagcggagcactgacatctggcgtgcacacctttccagccgtgctccaaagcagcggcctgtactctctgagcagcgtggtcacagtgcctagctctagcctgggcaccaagacctacacctgtaatgtggaccacaagcctagcaacaccaaggtggacaagcgcgtggaatctaagtacggccctccttgtcctccatgtcctggtaccatccccgaggacacattcttcccaagccccgagagcagctgcgacgtgaagctggtggaaaagagcttcgagacagacaccaacctgaacttccagaacctgagcgtgatcggcttcagaatcctgctgctgaaagtggccggctttaacctgctgatgaccctgcggctgtggtccagccgcgccaagagaagcggatctggcgtgaagcagaccctgaatttcgacctgctgaagctggctggcgacgtggaatccaacccaggcccttctagagccaccatggactggatttggcgcatccttttccttgtcggcgctgctaccggcgcgcattccttcgaagttcagctccttgagagtggtggcggcctggttcaacctggcggatctctgagactgtcttgtgccgacagcggcttcacctttagcggctattggatgcactgggtccgacaggcccctggcaaaggacttgaatgggtgtccgccatcagaagcgacggcagcagcaagtactacgccgactctgtgaagggcagattcaccatcagccgggacaacagcaagaacaccctgtacctccagatgaacagcctgagagccgaggacacagccgtgtattattgcgccaaggacggcgtgatcgaggacacctttgattactggggccagggcaccctggtcaccgtttcttctacgcgtgccagcaccaagggacccagcgttttcccactggctccctgtagcagaagcaccagcgaatctacagccgctctgggctgcctggtcaaggactactttcctgagcctgtgaccgtgtcctggaacagcggagcactgacatctggcgtgcacacctttccagccgtgctgcaaagcagcggcctgtactctctgagcagcgtggtcacagtgccaagctctagcctgggcaccaagacctacacctgtaatgtggaccacaagcctagcaacaccaaggtggacaagcgcgtggaatctaagtacggacctcctgcacctccagcacctggatccggcagagccgattgcggctttaccagcgagagctaccagcagggcgtgctgagcgccaccatcctgtacgagatcctgctgggcaaggccaccctgtacgccgtgctggtgtctgccctggtgctgatggctatggtcaagcggaaggacagccggggataa

SEQ ID NO: 8769 - DNA, 2778 bp, synthetic construct
  source 1..2778: mol_type = other DNA
atggccttaccagtgaccgccttgctcctgccgctggccttgctgctccacgccgccaggccggagatcgtgctgacacagtctcccgccacactgtcactgtctccaggcgaaagagccacactgagctgtagagccagccagagcgtgtcctcttacctggcctggtatcagcagaagcctggacaggctccccggctgctgatctacgatgccagcaatagagccacaggcatccccgccagattttctggctctggcagcggcaccgatttcaccctgaccataagcagcctggaacctgaggacttcgccgtgtactactgccagcagagaagcaactggcccctgacctttggacagggcaccaaggtggaaatcaaactcgagacagtggccgccccatctgtattcatctttcctccatctgatgaacagcttaagtccggcactgcttctgttgtttgcctgcttaacaatttttacccgcgggaagccaaggtgcaatggaaagtggacaacgccctgcagtctggtaacagtcaggaaagcgtgactgaacaggacagcaaagactccacatactccttgagttccaccttgacgctcagtaaggcagactacgagaagcacaaggtttatgcctgtgaagtgactcaccagggcctctctagcccagtgactaagtccttcaaccgcggggagtgtaggaagcgacgggggtcaggcgccactaacttctctctgctgaaacaagccggggacgtggaggagaatccaggtcccactagtatggactggatttggcgcatccttttccttgtcggcgctgctaccggcgcgcattccttcgaagtgcaactggttcaatcaggtggcggcctggttcaccctggcggatctctgagactgtcttgtaccggcagcggcttcaccttcagctaccacgccatgcactgggtccgacaggcacctggaaaaggactggaatgggtgtccatcatcggcacaggcggcgtgacctactacgccgattctgtgaagggcagattcaccatcagccgggacaacgtgaagaacagcctgtacctccagatgaactccctgagagccgaggatatggccgtgtattattgcgccagagactactacggcgctggcagcttttacgacggcctgtacggaatggatgtgtggggccagggaaccaccgtgactgtctcttctacgcgtgcctctacaaagggaccctccgtgtttcctctggctccctgtagcagaagcaccagcgaatctacagccgctctgggctgcctggtcaaggactactttcctgagcctgtgaccgtgtcctggaacagcggagcactgacatctggcgtgcacacctttccagccgtgctccaaagcagcggcctgtactctctgagcagcgtggtcacagtgcctagctctagcctgggcaccaagacctacacctgtaatgtggaccacaagcctagcaacaccaaggtggacaagcgcgtggaatctaagtacggccctccttgtcctccatgtcctggtaccatccccgaggacacattcttcccaagccccgagagcagctgcgacgtgaagctggtggaaaagagcttcgagacagacaccaacctgaacttccagaacctgagcgtgatcggcttcagaatcctgctgctgaaagtggccggctttaacctgctgatgaccctgcggctgtggtccagccgcgccaagagaagcggatctggcgtgaagcagaccctgaatttcgacctgctgaagctggctggcgacgtggaatccaacccaggcccttctagagccaccatggactggatttggcgcatccttttccttgtcggcgctgctaccggcgcgcattccttcgaacaagttcagctggttcagagcggagccgaagtgaagaaacctggcagcagcgtgaaggtgtcctgcaaagcaagcggcggcacctttagcacctacgccatccactgggttcgacaggcaccaggacaaggactggaatggatgggcagaatcatccccatcgagggcagagcctactacgcccagaaattccagggcagagtgaccatcaccgccgacgagtctacaagcaccgcctacatggaactgagcagcctgagaagcgaggataccgctgtgtactattgcgccagaggccggtacagctacagatattggttcgactactggggccagggcaccctggttacagtctcttctacgcgtgccagcaccaagggacccagcgttttcccactggctccctgtagcagaagcaccagcgaatctacagccgctctgggctgcctggtcaaggactactttcctgagcctgtgaccgtgtcctggaacagcggagcactgacatctggcgtgcacacctttccagccgtgctgcaaagcagcggcctgtactctctgagcagcgtggtcacagtgccaagctctagcctgggcaccaagacctacacctgtaatgtggaccacaagcctagcaacaccaaggtggacaagcgcgtggaatctaagtacggacctcctgcacctccagcacctggatccggcagagccgattgcggctttaccagcgagagctaccagcagggcgtgctgagcgccaccatcctgtacgagatcctgctgggcaaggccaccctgtacgccgtgctggtgtctgccctggtgctgatggctatggtcaagcggaaggacagccggggataa

SEQ ID NO: 8770 - DNA, 2781 bp, synthetic construct
  source 1..2781: mol_type = other DNA
atggccttaccagtgaccgccttgctcctgccgctggccttgctgctccacgccgccaggccggagatcgtgctgacacagtctcccgccacactgtcactgtctccaggcgaaagagccacactgagctgtagagccagccagagcgtgtcctcttacctggcctggtatcagcagaagcctggacaggctccccggctgctgatctacgatgccagcaatagagccacaggcatccccgccagattttctggctctggcagcggcaccgatttcaccctgaccataagcagcctggaacctgaggacttcgccgtgtactactgccagcagagaagcaactggcccctgacctttggacagggcaccaaggtggaaatcaaactcgagacagtggccgccccatctgtattcatctttcctccatctgatgaacagcttaagtccggcactgcttctgttgtttgcctgcttaacaatttttacccgcgggaagccaaggtgcaatggaaagtggacaacgccctgcagtctggtaacagtcaggaaagcgtgactgaacaggacagcaaagactccacatactccttgagttccaccttgacgctcagtaaggcagactacgagaagcacaaggtttatgcctgtgaagtgactcaccagggcctctctagcccagtgactaagtccttcaaccgcggggagtgtaggaagcgacgggggtcaggcgccactaacttctctctgctgaaacaagccggggacgtggaggagaatccaggtcccactagtatggactggatttggcgcatccttttccttgtcggcgctgctaccggcgcgcattccttcgaagtgcaactggttcaatcaggtggcggcctggttcaccctggcggatctctgagactgtcttgtaccggcagcggcttcaccttcagctaccacgccatgcactgggtccgacaggcacctggaaaaggactggaatgggtgtccatcatcggcacaggcggcgtgacctactacgccgattctgtgaagggcagattcaccatcagccgggacaacgtgaagaacagcctgtacctccagatgaactccctgagagccgaggatatggccgtgtattattgcgccagagactactacggcgctggcagcttttacgacggcctgtacggaatggatgtgtggggccagggaaccaccgtgactgtctcttctacgcgtgcctctacaaagggaccctccgtgtttcctctggctccctgtagcagaagcaccagcgaatctacagccgctctgggctgcctggtcaaggactactttcctgagcctgtgaccgtgtcctggaacagcggagcactgacatctggcgtgcacacctttccagccgtgctccaaagcagcggcctgtactctctgagcagcgtggtcacagtgcctagctctagcctgggcaccaagacctacacctgtaatgtggaccacaagcctagcaacaccaaggtggacaagcgcgtggaatctaagtacggccctccttgtcctccatgtcctggtaccatccccgaggacacattcttcccaagccccgagagcagctgcgacgtgaagctggtggaaaagagcttcgagacagacaccaacctgaacttccagaacctgagcgtgatcggcttcagaatcctgctgctgaaagtggccggctttaacctgctgatgaccctgcggctgtggtccagccgcgccaagagaagcggatctggcgtgaagcagaccctgaatttcgacctgctgaagctggctggcgacgtggaatccaacccaggcccttctagagccaccatggactggatttggcgcatccttttccttgtcggcgctgctaccggcgcgcattccttcgaacaactccaggtgcaggaatctggccccggactcgtgaagcccagcgagacactgagcctgacctgtaccgtgtccggcggcagcatcagcaacagctacttctcctggggctggatcagacagccccctggcaagggcctggaatggatcggcagcttctactacggcgagaaaacctactacaaccccagcctgaagtccagagccaccatcagcatcgacaccagcaagagccagttctccctgaagctgagcagcgtgacagccgccgacaccgccgtgtattattgccccagaggccccaccatgatccggggcgtgatcgactcttggggccagggaacactcgtgaccgtgtcctctacgcgtgccagcaccaagggacccagcgttttcccactggctccctgtagcagaagcaccagcgaatctacagccgctctgggctgcctggtcaaggactactttcctgagcctgtgaccgtgtcctggaacagcggagcactgacatctggcgtgcacacctttccagccgtgctgcaaagcagcggcctgtactctctgagcagcgtggtcacagtgccaagctctagcctgggcaccaagacctacacctgtaatgtggaccacaagcctagcaacaccaaggtggacaagcgcgtggaatctaagtacggacctcctgcacctccagcacctggatccggcagagccgattgcggctttaccagcgagagctaccagcagggcgtgctgagcgccaccatcctgtacgagatcctgctgggcaaggccaccctgtacgccgtgctggtgtctgccctggtgctgatggctatggtcaagcggaaggacagccggggataa

SEQ ID NO: 8771 - DNA, 2772 bp, synthetic construct
  source 1..2772: mol_type = other DNA
atggccttaccagtgaccgccttgctcctgccgctggccttgctgctccacgccgccaggccggagatcgtgctgacacagagccctgccaccctgtctctgagccctggcgaaagagccaccctgagctgtagagccagccagagcgtgcggagctacctggcctggtatcagcagaagcctggacaggcccccagactgctgatctacgacgccagcaatcgggccacaggcatccccgccagattttctggctctggcagcggcaccgacttcaccctgacaatcagcagcctggaacccgaggacttcgccgtgtactactgccagcagcggagcaactggccccctacctttggacagggcaccaaggtggaaatcaagctcgagacagtggccgccccatctgtattcatctttcctccatctgatgaacagcttaagtccggcactgcttctgttgtttgcctgcttaacaatttttacccgcgggaagccaaggtgcaatggaaagtggacaacgccctgcagtctggtaacagtcaggaaagcgtgactgaacaggacagcaaagactccacatactccttgagttccaccttgacgctcagtaaggcagactacgagaagcacaaggtttatgcctgtgaagtgactcaccagggcctctctagcccagtgactaagtccttcaaccgcggggagtgtaggaagcgacgggggtcaggcgccactaacttctctctgctgaaacaagccggggacgtggaggagaatccaggtcccactagtatggactggatttggcgcatccttttccttgtcggcgctgctaccggcgcgcattccttcgaagtgcaactggttcaatcaggtggcggcctggttcaccctggcggatctctgagactgtcttgtaccggcagcggcttcaccttcagctaccacgccatgcactgggtccgacaggcacctggaaaaggactggaatgggtgtccatcatcggcacaggcggcgtgacctactacgccgattctgtgaagggcagattcaccatcagccgggacaacgtgaagaacagcctgtacctccagatgaactccctgagagccgaggatatggccgtgtattattgcgccagagactactacggcgctggcagcttttacgacggcctgtacggaatggatgtgtggggccagggaaccaccgtgactgtctcttctacgcgtgcctctacaaagggaccctccgtgtttcctctggctccctgtagcagaagcaccagcgaatctacagccgctctgggctgcctggtcaaggactactttcctgagcctgtgaccgtgtcctggaacagcggagcactgacatctggcgtgcacacctttccagccgtgctccaaagcagcggcctgtactctctgagcagcgtggtcacagtgcctagctctagcctgggcaccaagacctacacctgtaatgtggaccacaagcctagcaacaccaaggtggacaagcgcgtggaatctaagtacggccctccttgtcctccatgtcctggtaccatccccgaggacacattcttcccaagccccgagagcagctgcgacgtgaagctggtggaaaagagcttcgagacagacaccaacctgaacttccagaacctgagcgtgatcggcttcagaatcctgctgctgaaagtggccggctttaacctgctgatgaccctgcggctgtggtccagccgcgccaagagaagcggatctggcgtgaagcagaccctgaatttcgacctgctgaagctggctggcgacgtggaatccaacccaggcccttctagagccaccatggactggatttggcgcatccttttccttgtcggcgctgctaccggcgcgcattccttcgaagttcagctccttgagagtggtggcggcctggttcaacctggcggatctctgagactgtcttgtgccgccagcggcttcacctttagcggctattggatgcactgggtccgacaggcccctggcaaaggacttgaatgggtgtccgccatcagaagcgacggcagcagcaagtactacgccgactctgtgaagggcagattcaccatcagccgggacaacagcaagaacaccctgtacctccagatgaacagcctgagagccgaggacacagccgtgtattattgcgccaaggacggcgtgatcgaggacacctttgattactggggccagggcaccctggtcaccgtttcttctacgcgtgccagcaccaagggacccagcgttttcccactggctccctgtagcagaagcaccagcgaatctacagccgctctgggctgcctggtcaaggactactttcctgagcctgtgaccgtgtcctggaacagcggagcactgacatctggcgtgcacacctttccagccgtgctgcaaagcagcggcctgtactctctgagcagcgtggtcacagtgccaagctctagcctgggcaccaagacctacacctgtaatgtggaccacaagcctagcaacaccaaggtggacaagcgcgtggaatctaagtacggacctcctgcacctccagcacctggatccggcagagccgattgcggctttaccagcgagagctaccagcagggcgtgctgagcgccaccatcctgtacgagatcctgctgggcaaggccaccctgtacgccgtgctggtgtctgccctggtgctgatggctatggtcaagcggaaggacagccggggataa

SEQ ID NO: 8772 - DNA, 2778 bp, synthetic construct
  source 1..2778: mol_type = other DNA
atggccttaccagtgaccgccttgctcctgccgctggccttgctgctccacgccgccaggccggagatcgtgctgacacagagccctgccaccctgtctctgagccctggcgaaagagccaccctgagctgtagagccagccagagcgtgcggagctacctggcctggtatcagcagaagcctggacaggcccccagactgctgatctacgacgccagcaatcgggccacaggcatccccgccagattttctggctctggcagcggcaccgacttcaccctgacaatcagcagcctggaacccgaggacttcgccgtgtactactgccagcagcggagcaactggccccctacctttggacagggcaccaaggtggaaatcaagctcgagacagtggccgccccatctgtattcatctttcctccatctgatgaacagcttaagtccggcactgcttctgttgtttgcctgcttaacaatttttacccgcgggaagccaaggtgcaatggaaagtggacaacgccctgcagtctggtaacagtcaggaaagcgtgactgaacaggacagcaaagactccacatactccttgagttccaccttgacgctcagtaaggcagactacgagaagcacaaggtttatgcctgtgaagtgactcaccagggcctctctagcccagtgactaagtccttcaaccgcggggagtgtaggaagcgacgggggtcaggcgccactaacttctctctgctgaaacaagccggggacgtggaggagaatccaggtcccactagtatggactggatttggcgcatccttttccttgtcggcgctgctaccggcgcgcattccttcgaagtgcaactggttcaatcaggtggcggcctggttcaccctggcggatctctgagactgtcttgtaccggcagcggcttcaccttcagctaccacgccatgcactgggtccgacaggcacctggaaaaggactggaatgggtgtccatcatcggcacaggcggcgtgacctactacgccgattctgtgaagggcagattcaccatcagccgggacaacgtgaagaacagcctgtacctccagatgaactccctgagagccgaggatatggccgtgtattattgcgccagagactactacggcgctggcagcttttacgacggcctgtacggaatggatgtgtggggccagggaaccaccgtgactgtctcttctacgcgtgcctctacaaagggaccctccgtgtttcctctggctccctgtagcagaagcaccagcgaatctacagccgctctgggctgcctggtcaaggactactttcctgagcctgtgaccgtgtcctggaacagcggagcactgacatctggcgtgcacacctttccagccgtgctccaaagcagcggcctgtactctctgagcagcgtggtcacagtgcctagctctagcctgggcaccaagacctacacctgtaatgtggaccacaagcctagcaacaccaaggtggacaagcgcgtggaatctaagtacggccctccttgtcctccatgtcctggtaccatccccgaggacacattcttcccaagccccgagagcagctgcgacgtgaagctggtggaaaagagcttcgagacagacaccaacctgaacttccagaacctgagcgtgatcggcttcagaatcctgctgctgaaagtggccggctttaacctgctgatgaccctgcggctgtggtccagccgcgccaagagaagcggatctggcgtgaagcagaccctgaatttcgacctgctgaagctggctggcgacgtggaatccaacccaggcccttctagagccaccatggactggatttggcgcatccttttccttgtcggcgctgctaccggcgcgcattccttcgaacaagttcagctggttcagagcggagccgaagtgaagaaacctggcagcagcgtgaaggtgtcctgcaaagcaagcggcggcacctttagcacctacgccatccactgggttcgacaggcaccaggacaaggactggaatggatgggcagaatcatccccatcgagggcagagcctactacgcccagaaattccagggcagagtgaccatcaccgccgacgagtctacaagcaccgcctacatggaactgagcagcctgagaagcgaggataccgctgtgtactattgcgccagaggccggtacagctacagatattggttcgactactggggccagggcaccctggttacagtctcttctacgcgtgccagcaccaagggacccagcgttttcccactggctccctgtagcagaagcaccagcgaatctacagccgctctgggctgcctggtcaaggactactttcctgagcctgtgaccgtgtcctggaacagcggagcactgacatctggcgtgcacacctttccagccgtgctgcaaagcagcggcctgtactctctgagcagcgtggtcacagtgccaagctctagcctgggcaccaagacctacacctgtaatgtggaccacaagcctagcaacaccaaggtggacaagcgcgtggaatctaagtacggacctcctgcacctccagcacctggatccggcagagccgattgcggctttaccagcgagagctaccagcagggcgtgctgagcgccaccatcctgtacgagatcctgctgggcaaggccaccctgtacgccgtgctggtgtctgccctggtgctgatggctatggtcaagcggaaggacagccggggataa

SEQ ID NO: 8773 - DNA, 2781 bp, synthetic construct
  source 1..2781: mol_type = other DNA
atggccttaccagtgaccgccttgctcctgccgctggccttgctgctccacgccgccaggccggagatcgtgctgacacagagccctgccaccctgtctctgagccctggcgaaagagccaccctgagctgtagagccagccagagcgtgcggagctacctggcctggtatcagcagaagcctggacaggcccccagactgctgatctacgacgccagcaatcgggccacaggcatccccgccagattttctggctctggcagcggcaccgacttcaccctgacaatcagcagcctggaacccgaggacttcgccgtgtactactgccagcagcggagcaactggccccctacctttggacagggcaccaaggtggaaatcaagctcgagacagtggccgccccatctgtattcatctttcctccatctgatgaacagcttaagtccggcactgcttctgttgtttgcctgcttaacaatttttacccgcgggaagccaaggtgcaatggaaagtggacaacgccctgcagtctggtaacagtcaggaaagcgtgactgaacaggacagcaaagactccacatactccttgagttccaccttgacgctcagtaaggcagactacgagaagcacaaggtttatgcctgtgaagtgactcaccagggcctctctagcccagtgactaagtccttcaaccgcggggagtgtaggaagcgacgggggtcaggcgccactaacttctctctgctgaaacaagccggggacgtggaggagaatccaggtcccactagtatggactggatttggcgcatccttttccttgtcggcgctgctaccggcgcgcattccttcgaagtgcaactggttcaatcaggtggcggcctggttcaccctggcggatctctgagactgtcttgtaccggcagcggcttcaccttcagctaccacgccatgcactgggtccgacaggcacctggaaaaggactggaatgggtgtccatcatcggcacaggcggcgtgacctactacgccgattctgtgaagggcagattcaccatcagccgggacaacgtgaagaacagcctgtacctccagatgaactccctgagagccgaggatatggccgtgtattattgcgccagagactactacggcgctggcagcttttacgacggcctgtacggaatggatgtgtggggccagggaaccaccgtgactgtctcttctacgcgtgcctctacaaagggaccctccgtgtttcctctggctccctgtagcagaagcaccagcgaatctacagccgctctgggctgcctggtcaaggactactttcctgagcctgtgaccgtgtcctggaacagcggagcactgacatctggcgtgcacacctttccagccgtgctccaaagcagcggcctgtactctctgagcagcgtggtcacagtgcctagctctagcctgggcaccaagacctacacctgtaatgtggaccacaagcctagcaacaccaaggtggacaagcgcgtggaatctaagtacggccctccttgtcctccatgtcctggtaccatccccgaggacacattcttcccaagccccgagagcagctgcgacgtgaagctggtggaaaagagcttcgagacagacaccaacctgaacttccagaacctgagcgtgatcggcttcagaatcctgctgctgaaagtggccggctttaacctgctgatgaccctgcggctgtggtccagccgcgccaagagaagcggatctggcgtgaagcagaccctgaatttcgacctgctgaagctggctggcgacgtggaatccaacccaggcccttctagagccaccatggactggatttggcgcatccttttccttgtcggcgctgctaccggcgcgcattccttcgaacaactccaggtgcaggaatctggccccggactcgtgaagcccagcgagacactgagcctgacctgtaccgtgtccggcggcagcatcagcaacagctacttctcctggggctggatcagacagccccctggcaagggcctggaatggatcggcagcttctactacggcgagaaaacctactacaaccccagcctgaagtccagagccaccatcagcatcgacaccagcaagagccagttctccctgaagctgagcagcgtgacagccgccgacaccgccgtgtattattgccccagaggccccaccatgatccggggcgtgatcgactcttggggccagggaacactcgtgaccgtgtcctctacgcgtgccagcaccaagggacccagcgttttcccactggctccctgtagcagaagcaccagcgaatctacagccgctctgggctgcctggtcaaggactactttcctgagcctgtgaccgtgtcctggaacagcggagcactgacatctggcgtgcacacctttccagccgtgctgcaaagcagcggcctgtactctctgagcagcgtggtcacagtgccaagctctagcctgggcaccaagacctacacctgtaatgtggaccacaagcctagcaacaccaaggtggacaagcgcgtggaatctaagtacggacctcctgcacctccagcacctggatccggcagagccgattgcggctttaccagcgagagctaccagcagggcgtgctgagcgccaccatcctgtacgagatcctgctgggcaaggccaccctgtacgccgtgctggtgtctgccctggtgctgatggctatggtcaagcggaaggacagccggggataa

SEQ ID NO: 8774 - DNA, 2775 bp, synthetic construct; identical to SEQ ID NO: 8755
  source 1..2775: mol_type = other DNA

SEQ ID NO: 8775 - DNA, 2772 bp, synthetic construct; identical to SEQ ID NO: 8762
  source 1..2772: mol_type = other DNA

SEQ ID NO: 8776 - DNA, 2871 bp, synthetic construct; identical to SEQ ID NO: 8763
  source 1..2871: mol_type = other DNA

SEQ ID NO: 8777 - DNA, 2769 bp, synthetic construct; identical to SEQ ID NO: 8764
  source 1..2769: mol_type = other DNA

SEQ ID NO: 8778 - DNA, 2781 bp, synthetic construct; identical to SEQ ID NO: 8765
  source 1..2781: mol_type = other DNA

SEQ ID NO: 8779 - DNA, 25 bp, synthetic construct
  source 1..25: mol_type = other DNA
ggggggggggggggggggggggggg

SEQ ID NO: 8780 - DNA, 2775 bp, synthetic construct
  source 1..2775: mol_type = other DNA
atggccttaccagtgaccgccttgctcctgccgctggccttgctgctccacgccgccaggccggagatcgtgctgacacagtctcccgccacactgtcactgtctccaggcgaaagagccacactgagctgtagagccagccagagcgtgtcctcttacctggcctggtatcagcagaagcctggacaggctccccggctgctgatctacgatgccagcaatagagccacaggcatccccgccagattttctggctctggcagcggcaccgatttcaccctgaccataagcagcctggaacctgaggacttcgccgtgtactactgccagcagagaagcaactggcccctgacctttggacagggcaccaaggtggaaatcaaactcgagacagtggccgccccatctgtattcatctttcctccatctgatgaacagcttaagtccggcactgcttctgttgtttgcctgcttaacaatttttacccgcgggaagccaaggtgcaatggaaagtggacaacgccctgcagtctggtaacagtcaggaaagcgtgactgaacaggacagcaaagactccacatactccttgagttccaccttgacgctcagtaaggcagactacgagaagcacaaggtttatgcctgtgaagtgactcaccagggcctctctagcccagtgactaagtccttcaaccgcggggagtgtaggaagcgacgggggtcaggcgccactaacttctctctgctgaaacaagccggggacgtggaggagaatccaggtcccactagtatggactggatttggcgcatccttttccttgtcggcgctgctaccggcgcgcattccttcgaacaactccaggtgcaggaatctggccccggactcgtgaagcccagcgagacactgagcctgacctgtaccgtgtccggcggcagcatcagcaacagctacttctcctggggctggatcagacagccccctggcaagggcctggaatggatcggcagcttctactacggcgagaaaacctactacaaccccagcctgaagtccagagccaccatcagcatcgacaccagcaagagccagttctccctgaagctgagcagcgtgacagccgccgacaccgccgtgtattattgccccagaggccccaccatgatccggggcgtgatcgactcttggggccagggaacactcgtgaccgtgtcctctacgcgtgcctctacaaagggaccctccgtgtttcctctggctccctgtagcagaagcaccagcgaatctacagccgctctgggctgcctggtcaaggactactttcctgagcctgtgaccgtgtcctggaacagcggagcactgacatctggcgtgcacacctttccagccgtgctccaaagcagcggcctgtactctctgagcagcgtggtcacagtgcctagctctagcctgggcaccaagacctacacctgtaatgtggaccacaagcctagcaacaccaaggtggacaagcgcgtggaatctaagtacggccctccttgtcctccatgtcctggtaccatccccgaggacacattcttcccaagccccgagagcagctgcgacgtgaagctggtggaaaagagcttcgagacagacaccaacctgaacttccagaacctgagcgtgatcggcttcagaatcctgctgctgaaagtggccggctttaacctgctgatgaccctgcggctgtggtccagccgcgccaagagaagcggatctggcgtgaagcagaccctgaatttcgacctgctgaagctggctggcgacgtggaatccaacccaggcccttctagagccaccatggactggatttggcgcatccttttccttgtcggcgctgctaccggcgcgcattccttcgaagaagtgcagctggtggaatcaggcggcggactggtgcagcctggcagaagcctgagactgagctgtgccgccagcggcttcaccttcaacgactacgccatgcactgggtgcgccaggcccctggaaaaggactggaatgggtgtccacaatcagctggaacagcggcagcatcggctacgccgatagcgtgaagggccggttcaccatcagccgggacaacgccaagaagtccctgtacctccagatgaacagcctgcgggccgaggacacagccctgtactattgcgccaaggacatccagtacggcaactactactacggcatggacgtgtggggccagggaaccaccgtgaccgtgtcatctacgcgtgccagcaccaagggacccagcgttttcccactggctccctgtagcagaagcaccagcgaatctacagccgctctgggctgcctggtcaaggactactttcctgagcctgtgaccgtgtcctggaacagcggagcactgacatctggcgtgcacacctttccagccgtgctgcaaagcagcggcctgtactctctgagcagcgtggtcacagtgccaagctctagcctgggcaccaagacctacacctgtaatgtggaccacaagcctagcaacaccaaggtggacaagcgcgtggaatctaagtacggacctcctgcacctccagcacctggatccggcagagccgattgcggctttaccagcgagagctaccagcagggcgtgctgagcgccaccatcctgtacgagatcctgctgggcaaggccaccctgtacgccgtgctggtgtctgccctggtgctgatggctatggtcaagcggaaggacagccggggataa

SEQ ID NO: 8781 - DNA, 2757 bp, synthetic construct
  source 1..2757: mol_type = other DNA
atggccttaccagtgaccgccttgctcctgccgctggccttgctgctccacgccgccaggccggacatccagatgacccagagcagcagctacctgagcgtgtcccttggcggcagagtgaccatcacctgtaaagccagcgaccacatcaacaactggctggcctggtatcagcagaagcctggcaacgcccctagactgctgattagcggagccacctctctggaaacaggcgtgccaagcagattttccggcagcggctctggcaaggactacaccctgagcatcaccagcctccagaccgaggatgtggctacctactactgccagcagtattggagcaccccttggacctttggcggaggcaccaagctggaaatcaaactcgagacagtggccgccccatctgtattcatctttcctccatctgatgaacagcttaagtccggcactgcttctgttgtttgcctgcttaacaatttttacccgcgggaagccaaggtgcaatggaaagtggacaacgccctgcagtctggtaacagtcaggaaagcgtgactgaacaggacagcaaagactccacatactccttgagttccaccttgacgctcagtaaggcagactacgagaagcacaaggtttatgcctgtgaagtgactcaccagggcctctctagcccagtgactaagtccttcaaccgcggggagtgtaggaagcgacgggggtcaggcgccactaacttctctctgctgaaacaagccggggacgtggaggagaatccaggtcccactagtatggactggatttggcgcatccttttccttgtcggcgctgctaccggcgcgcattccttcgaagttcagctggttgaatctggcggcggactggttcaacctggcggatctctgagactgagctgtgccgcctctggctacgcctttagcagctactgggtcaactgggttcgacaggcccctggcaaaggactggaatgggtcgcccaaatctatcccggcgacggcgacaccaactacaacggcaagttcaagggcagattcaccatcagccgggacaacagcaagaacaccctgtacctccagatgaactccctgagagccgaggacaccgccgtgtactattgtgccagatccatcaccaccgtcgtgggctgcgctatggattattggggccagggaaccctggtcaccgtgtcctctacgcgtgcctctacaaagggaccctccgtgtttcctctggctccctgtagcagaagcaccagcgaatctacagccgctctgggctgcctggtcaaggactactttcctgagcctgtgaccgtgtcctggaacagcggagcactgacatctggcgtgcacacctttccagccgtgctccaaagcagcggcctgtactctctgagcagcgtggtcacagtgcctagctctagcctgggcaccaagacctacacctgtaatgtggaccacaagcctagcaacaccaaggtggacaagcgcgtgggtaccgaagtgaaaaccgactccaccgaccacgtgaagcccaaagagacagagaacaccaagcagcccagcaagagctgccacaagcccaaggccatcgtgcacaccgagaaagtgaacatgatgagcctgaccgtgctgggcttcagaatcctgctgctgaaagtggccggctttaacctgctgatgaccctgcggctgtggtccagccgcgccaagagaagcggatctggcgtgaagcagaccctgaatttcgacctgctgaagctggctggcgacgtggaatccaacccaggcccttctagagccaccatggactggatttggcgcatccttttccttgtcggcgctgctaccggcgcgcattccttcgaacaggttcagctccagcagtctggcgctgagcttgctagacctggcgcttctgtgaagctgagctgcaaggccagcggctacaccttcaccagctactggatgcagtgggtcaagcagaggccaggccaaggactggaatggatcggagccatctatcccggcgacggcgataccagatacacccagaagttcaagggcaaagccacactgaccgccgacaagagcagctccacagcctacatgcaactgagcagcctggcttccgaggacagcgccgtgtactattgtgccagaggcaaggtgtactacggcagcaaccctttcgcctattggggccagggaaccctggttacagtgtctgctacgcgtgccagcaccaagggacccagcgttttcccactggctccctgtagcagaagcaccagcgaatctacagccgctctgggctgcctggtcaaggactactttcctgagcctgtgaccgtgtcctggaacagcggagcactgacatctggcgtgcacacctttccagccgtgctgcaaagcagcggcctgtactctctgagcagcgtggtcacagtgccaagctctagcctgggcaccaagacctacacctgtaatgtggaccacaagcctagcaacaccaaggtggacaagcgcgtggaatctaagtacggacctcctgcacctccagcacctggatccggcagagccgattgcggctttaccagcgagagctaccagcagggcgtgctgagcgccaccatcctgtacgagatcctgctgggcaaggccaccctgtacgccgtgctggtgtctgccctggtgctgatggctatggtcaagcggaaggacagccggggataa

SEQ ID NO: 8782 - DNA, 2799 bp, synthetic construct
  source 1..2799: mol_type = other DNA
atggccttaccagtgaccgccttgctcctgccgctggccttgctgctccacgccgccaggccggacatccagatgacccagagcagcagctacctgagcgtgtcccttggcggcagagtgaccatcacctgtaaagccagcgaccacatcaacaactggctggcctggtatcagcagaagcctggcaacgcccctagactgctgattagcggagccacctctctggaaacaggcgtgccaagcagattttccggcagcggctctggcaaggactacaccctgagcatcaccagcctccagaccgaggatgtggctacctactactgccagcagtattggagcaccccttggacctttggcggaggcaccaagctggaaatcaaactcgagacagtggccgccccatctgtattcatctttcctccatctgatgaacagcttaagtccggcactgcttctgttgtttgcctgcttaacaatttttacccgcgggaagccaaggtgcaatggaaagtggacaacgccctgcagtctggtaacagtcaggaaagcgtgactgaacaggacagcaaagactccacatactccttgagttccaccttgacgctcagtaaggcagactacgagaagcacaaggtttatgcctgtgaagtgactcaccagggcctctctagcccagtgactaagtccttcaaccgcggggagtgtaggaagcgacgggggtcaggcgccactaacttctctctgctgaaacaagccggggacgtggaggagaatccaggtcccactagtatggactggatttggcgcatccttttccttgtcggcgctgctaccggcgcgcattccttcgaacaagttcagcttcaacagcctggcgctgagctggtcaaacctggcgcttctgtgaagatgagctgcaaagccagcggctacgccttcagcagctactggatcaactggatgaagcagaaacccggccagggactcgaatggatcggccaaatctatcccggcgacggcgacaccaactacaacggcaagttcaagggcagagccacactgaccgccgatacctctagcagcacagcctacatgcagctgagcagcctgaccagcgaagatagcgccgtgtacttctgtgcccggtccatcacaacagtcgtgggctgcgctatggactattggggccagggaacaagcgtgaccgtgtctagtacgcgtgcctctacaaagggaccctccgtgtttcctctggctccctgtagcagaagcaccagcgaatctacagccgctctgggctgcctggtcaaggactactttcctgagcctgtgaccgtgtcctggaacagcggagcactgacatctggcgtgcacacctttccagccgtgctccaaagcagcggcctgtactctctgagcagcgtggtcacagtgcctagctctagcctgggcaccaagacctacacctgtaatgtggaccacaagcctagcaacaccaaggtggacaagcgcgtgggtaccgaagtgaaaaccgactccaccgaccacgtgaagcccaaagagacagagaacaccaagcagcccagcaagagctgccacaagcccaaggccatcgtgcacaccgagaaagtgaacatgatgagcctgaccgtgctgggcttcagaatcctgctgctgaaagtggccggctttaacctgctgatgaccctgcggctgtggtccagccgcgccaagagaagcggatctggcgtgaagcagaccctgaatttcgacctgctgaagctggctggcgacgtggaatccaacccaggcccttctagagccaccatggactggatttggcgcatccttttccttgtcggcgctgctaccggcgcgcattccttcgaacaggttcagctccagcagtctggcgctgagcttgctagacctggcgcttctgtgaagctgagctgcaaggccagcggctacaccttcaccagctactggatgcagtgggtcaagcagaggccaggccaaggactggaatggatcggagccatctatcccggcgacggcgataccagatacacccagaagttcaagggcaaagccacactgaccgccgacaagagcagctccacagcctacatgcaactgagcagcctggcttccgaggacagcgccgtgtactattgtgccagaggcaaggtgtactacggcagcaaccctttcgcctattggggccagggaaccctggttacagtgtctgctacgcgtgccagcaccaagggacccagcgttttcccactggctccctgtagcagaagcaccagcgaatctacagccgctctgggctgcctggtcaaggactactttcctgagcctgtgaccgtgtcctggaacagcggagcactgacatctggcgtgcacacctttccagccgtgctgcaaagcagcggcctgtactctctgagcagcgtggtcacagtgccaagctctagcctgggcaccaagacctacacctgtaatgtggaccacaagcctagcaacaccaaggtggacaagcgcgtggaatctaagtacggacctcctgcacctccagcacctggatcccccatcaagaccgatgtgattacaatggaccccaaggacaactgctccaaggacgccaacgataccctgctgctccagctgaccaacaccagcgccaccatcctgtacgagatcctgctgggcaaggccaccctgtacgccgtgctggtgtctgccctggtgctgatggctatggtcaagcggaaggacagccggggataa

SEQ ID NO: 8783 - DNA, 2775 bp, synthetic construct
  source 1..2775: mol_type = other DNA
atggccttaccagtgaccgccttgctcctgccgctggccttgctgctccacgccgccaggccggagatcgtgctgacacagagccctggcaccctgagcctgtctccaggcgaaagagccacactgagctgtcgggccagccagagcgtgtccagctcttacctggcctggtatcagcagaagcccggccaggctccccggctgctgatctatggcgcttctagcagagccaccggcatccccgatagattcagcggctctggcagcggcaccgacttcaccctgaccatcagcagactggaacccgaggacttcgccgtgtactactgccagcagtacggcagcagcccctggacctttggacagggcaccaaggtggaaatcaagagactcgagacagtggccgccccatctgtattcatctttcctccatctgatgaacagcttaagtccggcactgcttctgttgtttgcctgcttaacaatttttacccgcgggaagccaaggtgcaatggaaagtggacaacgccctgcagtctggtaacagtcaggaaagcgtgactgaacaggacagcaaagactccacatactccttgagttccaccttgacgctcagtaaggcagactacgagaagcacaaggtttatgcctgtgaagtgactcaccagggcctctctagcccagtgactaagtccttcaaccgcggggagtgtaggaagcgacgggggtcaggcgccactaacttctctctgctgaaacaagccggggacgtggaggagaatccaggtcccactagtatggactggatttggcgcatccttttccttgtcggcgctgctaccggcgcgcattccttcgaagttcagctggttgaatcaggtggcggcctggttcaacctggcggatctctgagactgtcttgtgccgccagcggcttcactttcagcggcagatccatgaactgggtccgacaggcccctggcaaaggactggaatgggtgtcctacatcagcagcgacagccggaccatctactacgccgatagcgtgaagggcagattcaccatctccagagacaacgccaagaacagcctgtacctccagatgaactccctgagagccgaggacacagccgtgtattattgtgccagaggcggccacggctacttcgatctttggggcagaggcaccctggtcaccgtttcttctacgcgtgcctctacaaagggaccctccgtgtttcctctggctccctgtagcagaagcaccagcgaatctacagccgctctgggctgcctggtcaaggactactttcctgagcctgtgaccgtgtcctggaacagcggagcactgacatctggcgtgcacacctttccagccgtgctccaaagcagcggcctgtactctctgagcagcgtggtcacagtgcctagctctagcctgggcaccaagacctacacctgtaatgtggaccacaagcctagcaacaccaaggtggacaagcgcgtggaatctaagtacggccctccttgtcctccatgtcctggtaccatccccgaggacacattcttcccaagccccgagagcagctgcgacgtgaagctggtggaaaagagcttcgagacagacaccaacctgaacttccagaacctgagcgtgatcggcttcagaatcctgctgctgaaagtggccggctttaacctgctgatgaccctgcggctgtggtccagccgcgccaagagaagcggatctggcgtgaagcagaccctgaatttcgacctgctgaagctggctggcgacgtggaatccaacccaggcccttctagagccaccatggactggatttggcgcatccttttccttgtcggcgctgctaccggcgcgcattccttcgaacaggtgcaactccaggaatctggccccggactggctaagcccagcgagacactgagcctgacctgtaccgtgtccggcgacagcatcaccagctactactggtcctggatcagacagccccctggcaagggcctggaatggatcggctacatctactacagcggcagcaccaactacaaccccagcctgaagtccagagtgaccatcagcgtggacaccagcaagaaccagttctccctgaagctgagcagcgtgacagccgccgacaccgccgtgtattattgcgccagagatcagcggagaatcgccgctgccggcacccacttttacggcatggatgtgtggggccagggcaccaccgtgaccgtgtcatctacgcgtgccagcaccaagggacccagcgttttcccactggctccctgtagcagaagcaccagcgaatctacagccgctctgggctgcctggtcaaggactactttcctgagcctgtgaccgtgtcctggaacagcggagcactgacatctggcgtgcacacctttccagccgtgctgcaaagcagcggcctgtactctctgagcagcgtggtcacagtgccaagctctagcctgggcaccaagacctacacctgtaatgtggaccacaagcctagcaacaccaaggtggacaagcgcgtggaatctaagtacggacctcctgcacctccagcacctggatccggcagagccgattgcggctttaccagcgagagctaccagcagggcgtgctgagcgccaccatcctgtacgagatcctgctgggcaaggccaccctgtacgccgtgctggtgtctgccctggtgctgatggctatggtcaagcggaaggacagccggggataa

SEQ ID NO: 8784 - DNA, 2745 bp, synthetic construct
  source 1..2745: mol_type = other DNA
atggccttaccagtgaccgccttgctcctgccgctggccttgctgctccacgccgccaggccggagatcgtgctgacacagagccctggcaccctgagcctgtctccaggcgaaagagccacactgagctgtcgggccagccagagcgtgtccagctcttacctggcctggtatcagcagaagcccggccaggctccccggctgctgatctatggcgcttctagcagagccaccggcatccccgatagattcagcggctctggcagcggcaccgacttcaccctgaccatcagcagactggaacccgaggacttcgccgtgtactactgccagcagtacggcagcagcccctggacctttggacagggcaccaaggtggaaatcaagagactcgagacagtggccgccccatctgtattcatctttcctccatctgatgaacagcttaagtccggcactgcttctgttgtttgcctgcttaacaatttttacccgcgggaagccaaggtgcaatggaaagtggacaacgccctgcagtctggtaacagtcaggaaagcgtgactgaacaggacagcaaagactccacatactccttgagttccaccttgacgctcagtaaggcagactacgagaagcacaaggtttatgcctgtgaagtgactcaccagggcctctctagcccagtgactaagtccttcaaccgcggggagtgtaggaagcgacgggggtcaggcgccactaacttctctctgctgaaacaagccggggacgtggaggagaatccaggtcccactagtatggactggatttggcgcatccttttccttgtcggcgctgctaccggcgcgcattccttcgaagttcagctggttgaatcaggtggcggcctggttcaacctggcggatctctgagactgtcttgtgccgccagcggcttcactttcagcggcagatccatgaactgggtccgacaggcccctggcaaaggactggaatgggtgtcctacatcagcagcgacagccggaccatctactacgccgatagcgtgaagggcagattcaccatctccagagacaacgccaagaacagcctgtacctccagatgaactccctgagagccgaggacacagccgtgtattattgtgccagaggcggccacggctacttcgatctttggggcagaggcaccctggtcaccgtttcttctacgcgtgcctctacaaagggaccctccgtgtttcctctggctccctgtagcagaagcaccagcgaatctacagccgctctgggctgcctggtcaaggactactttcctgagcctgtgaccgtgtcctggaacagcggagcactgacatctggcgtgcacacctttccagccgtgctccaaagcagcggcctgtactctctgagcagcgtggtcacagtgcctagctctagcctgggcaccaagacctacacctgtaatgtggaccacaagcctagcaacaccaaggtggacaagcgcgtggaatctaagtacggccctccttgtcctccatgtcctggtaccatccccgaggacacattcttcccaagccccgagagcagctgcgacgtgaagctggtggaaaagagcttcgagacagacaccaacctgaacttccagaacctgagcgtgatcggcttcagaatcctgctgctgaaagtggccggctttaacctgctgatgaccctgcggctgtggtccagccgcgccaagagaagcggatctggcgtgaagcagaccctgaatttcgacctgctgaagctggctggcgacgtggaatccaacccaggcccttctagagccaccatggactggatttggcgcatccttttccttgtcggcgctgctaccggcgcgcattccttcgaacaagtgcatctccaggaaagcggacccggcctcgtgaagcctagcgagacactgagcctgacctgcaccgtgtccgacgacagcatcagcagctactactggtcctggatcagacagccccctggcaagggcctggaatggatcggccacatcagctacagcggcagcgccaactacaaccccagcctgaagtccagagtgaccatctccgtggacaccagcaagaaccagttctccctgaagctgagcagcgtgacagccgccgacaccgccgtgtattattgcgccaactgggacgacgccttcaacatctggggccagggcacaatggtcaccgtgtctagcacgcgtgccagcaccaagggacccagcgttttcccactggctccctgtagcagaagcaccagcgaatctacagccgctctgggctgcctggtcaaggactactttcctgagcctgtgaccgtgtcctggaacagcggagcactgacatctggcgtgcacacctttccagccgtgctgcaaagcagcggcctgtactctctgagcagcgtggtcacagtgccaagctctagcctgggcaccaagacctacacctgtaatgtggaccacaagcctagcaacaccaaggtggacaagcgcgtggaatctaagtacggacctcctgcacctccagcacctggatccggcagagccgattgcggctttaccagcgagagctaccagcagggcgtgctgagcgccaccatcctgtacgagatcctgctgggcaaggccaccctgtacgccgtgctggtgtctgccctggtgctgatggctatggtcaagcggaaggacagccggggataa

SEQ ID NO: 8785 - DNA, 2781 bp, synthetic construct
  source 1..2781: mol_type = other DNA
atggccttaccagtgaccgccttgctcctgccgctggccttgctgctccacgccgccaggccggacatccagatgacccagaccacaagcagcctgtctgccagcctgggcgacagagtgaccatctcttgtagagccagccaggacatcagcaactacctgaactggtatcagcagaaacccgacggcaccgtgaagctgctgatctactacaccagcatcctgcacagcggcgtgcccagcagattttctggctctggcagcggcaccgactacagcctgaccatcagcaatctggaacaagaggacttcgctacctacttctgccagcaaggcaacaccctgccttggacatttggcggaggcaccaagctggaaatcaaagctctcgagacagtggccgccccatctgtattcatctttcctccatctgatgaacagcttaagtccggcactgcttctgttgtttgcctgcttaacaatttttacccgcgggaagccaaggtgcaatggaaagtggacaacgccctgcagtctggtaacagtcaggaaagcgtgactgaacaggacagcaaagactccacatactccttgagttccaccttgacgctcagtaaggcagactacgagaagcacaaggtttatgcctgtgaagtgactcaccagggcctctctagcccagtgactaagtccttcaaccgcggggagtgtaggaagcgacgggggtcaggcgccactaacttctctctgctgaaacaagccggggacgtggaggagaatccaggtcccactagtatggactggatttggcgcatccttttccttgtcggcgctgctaccggcgcgcattccttcgaagtgcagctggttgagtctggcggcggacttgtgaaacctggcggaagcctgaagctgagctgtgccgcttctggcttcgccttcagcatctacgacatgagctgggtccgacaggcccctggcaaaggacttgagtgggtcgcctacatcagctctggcggagggacaacctactatcccgacaccgtgaagggcagattcaccatcagccgggacaacgccaagaacaccctgtacctccagatgagcagcctgagagccgaggacaccgccatgtactactgtgccagacacagcggctacggcagctcttacggcgtgctgtttgcctattggggccagggcacactggtcaccgttagctctacgcgtgcctctacaaagggaccctccgtgtttcctctggctccctgtagcagaagcaccagcgaatctacagccgctctgggctgcctggtcaaggactactttcctgagcctgtgaccgtgtcctggaacagcggagcactgacatctggcgtgcacacctttccagccgtgctccaaagcagcggcctgtactctctgagcagcgtggtcacagtgcctagctctagcctgggcaccaagacctacacctgtaatgtggaccacaagcctagcaacaccaaggtggacaagcgcgtggaatctaagtacggccctccttgtcctccatgtcctggtaccatccccgaggacacattcttcccaagccccgagagcagctgcgacgtgaagctggtggaaaagagcttcgagacagacaccaacctgaacttccagaacctgagcgtgatcggcttcagaatcctgctgctgaaagtggccggctttaacctgctgatgaccctgcggctgtggtccagccgcgccaagagaagcggatctggcgtgaagcagaccctgaatttcgacctgctgaagctggctggcgacgtggaatccaacccaggcccttctagagccaccatggactggatttggcgcatccttttccttgtcggcgctgctaccggcgcgcattccttcgaagtgcagctggttgagtctggcggcggacttgtgaaacctggcggaagcctgaagctgagctgtgccgcttctggcttcgccttcagcatctacgacatgagctgggtccgacaggcccctggcaaaggacttgagtgggtcgcctacatcagctctggcggagggacaacctactatcccgacaccgtgaagggcagattcaccatcagccgggacaacgccaagaacaccctgtacctccagatgagcagcctgagagccgaggacaccgccatgtactactgtgccagacacagcggctacggcagctcttacggcgtgctgtttgcctattggggccagggcacactggtcaccgttagctctacgcgtgccagcaccaagggacccagcgttttcccactggctccctgtagcagaagcaccagcgaatctacagccgctctgggctgcctggtcaaggactactttcctgagcctgtgaccgtgtcctggaacagcggagcactgacatctggcgtgcacacctttccagccgtgctgcaaagcagcggcctgtactctctgagcagcgtggtcacagtgccaagctctagcctgggcaccaagacctacacctgtaatgtggaccacaagcctagcaacaccaaggtggacaagcgcgtggaatctaagtacggacctcctgcacctccagcacctggatccggcagagccgattgcggctttaccagcgagagctaccagcagggcgtgctgagcgccaccatcctgtacgagatcctgctgggcaaggccaccctgtacgccgtgctggtgtctgccctggtgctgatggctatggtcaagcggaaggacagccggggataa

SEQ ID NO: 8786 - DNA, 2763 bp, synthetic construct
  source 1..2763: mol_type = other DNA
atggccttaccagtgaccgccttgctcctgccgctggccttgctgctccacgccgccaggccggacatccagatgacccagaccacaagcagcctgtctgccagcctgggcgacagagtgaccatctcttgtagagccagccaggacatcagcaactacctgaactggtatcagcagaaacccgacggcaccgtgaagctgctgatctactacaccagcatcctgcacagcggcgtgcccagcagattttctggctctggcagcggcaccgactacagcctgaccatcagcaatctggaacaagaggacttcgctacctacttctgccagcaaggcaacaccctgccttggacatttggcggaggcaccaagctggaaatcaaagctctcgagacagtggccgccccatctgtattcatctttcctccatctgatgaacagcttaagtccggcactgcttctgttgtttgcctgcttaacaatttttacccgcgggaagccaaggtgcaatggaaagtggacaacgccctgcagtctggtaacagtcaggaaagcgtgactgaacaggacagcaaagactccacatactccttgagttccaccttgacgctcagtaaggcagactacgagaagcacaaggtttatgcctgtgaagtgactcaccagggcctctctagcccagtgactaagtccttcaaccgcggggagtgtaggaagcgacgggggtcaggcgccactaacttctctctgctgaaacaagccggggacgtggaggagaatccaggtcccactagtatggactggatttggcgcatccttttccttgtcggcgctgctaccggcgcgcattccttcgaagtgcagctggttgagtctggcggcggacttgtgaaacctggcggaagcctgaagctgagctgtgccgcttctggcttcgccttcagcatctacgacatgagctgggtccgacaggcccctggcaaaggacttgagtgggtcgcctacatcagctctggcggagggacaacctactatcccgacaccgtgaagggcagattcaccatcagccgggacaacgccaagaacaccctgtacctccagatgagcagcctgagagccgaggacaccgccatgtactactgtgccagacacagcggctacggcagctcttacggcgtgctgtttgcctattggggccagggcacactggtcaccgttagctctacgcgtgcctctacaaagggaccctccgtgtttcctctggctccctgtagcagaagcaccagcgaatctacagccgctctgggctgcctggtcaaggactactttcctgagcctgtgaccgtgtcctggaacagcggagcactgacatctggcgtgcacacctttccagccgtgctccaaagcagcggcctgtactctctgagcagcgtggtcacagtgcctagctctagcctgggcaccaagacctacacctgtaatgtggaccacaagcctagcaacaccaaggtggacaagcgcgtggaatctaagtacggccctccttgtcctccatgtcctggtaccatccccgaggacacattcttcccaagccccgagagcagctgcgacgtgaagctggtggaaaagagcttcgagacagacaccaacctgaacttccagaacctgagcgtgatcggcttcagaatcctgctgctgaaagtggccggctttaacctgctgatgaccctgcggctgtggtccagccgcgccaagagaagcggatctggcgtgaagcagaccctgaatttcgacctgctgaagctggctggcgacgtggaatccaacccaggcccttctagagccaccatggactggatttggcgcatccttttccttgtcggcgctgctaccggcgcgcattccttcgaagtgcagctggttgaatcaggtggcggcctggttcaacctggcggatctctgagactgagctgtgccgccagcggcttcaccttcagcgactactttatgagctgggtccgacaggcccctggcaaaggacttgaatgggtcgccaccatcagcaatggcggcacctacacttactaccccgacagcgtgaagggcagattcaccatctccagagacaacagcaagaacaccctgtacctccagatgaactccctgagagccgaggacaccgccgtgtactactgcgccagattcgacggctacatcttcgactattggggccagggcaccctggtcacagtctcttctacgcgtgccagcaccaagggacccagcgttttcccactggctccctgtagcagaagcaccagcgaatctacagccgctctgggctgcctggtcaaggactactttcctgagcctgtgaccgtgtcctggaacagcggagcactgacatctggcgtgcacacctttccagccgtgctgcaaagcagcggcctgtactctctgagcagcgtggtcacagtgccaagctctagcctgggcaccaagacctacacctgtaatgtggaccacaagcctagcaacaccaaggtggacaagcgcgtggaatctaagtacggacctcctgcacctccagcacctggatccggcagagccgattgcggctttaccagcgagagctaccagcagggcgtgctgagcgccaccatcctgtacgagatcctgctgggcaaggccaccctgtacgccgtgctggtgtctgccctggtgctgatggctatggtcaagcggaaggacagccggggataa

SEQ ID NO: 8787 - DNA, 2721 bp, synthetic construct
  source 1..2721: mol_type = other DNA
atggccttaccagtgaccgccttgctcctgccgctggccttgctgctccacgccgccaggccggagatcgtgctgacacagagccctggcacactgtcactgtctccaggcgaaagagccacactgagctgtagagccagccagagcgtgtccagctcttacctggcttggtatcagcagaagcccggacaggctcccagactgctgatctacggtgcctctagcagagccacaggcatccccgatagattttctggcagcggctccggcaccgacttcaccctgacaatcagcagactggaacccgaggacttcgccgtgtactactgccagcagtaccaccactctccactgacctttggcggaggcaccaaggtggaaatcaagagactcgagacagtggccgccccatctgtattcatctttcctccatctgatgaacagcttaagtccggcactgcttctgttgtttgcctgcttaacaatttttacccgcgggaagccaaggtgcaatggaaagtggacaacgccctgcagtctggtaacagtcaggaaagcgtgactgaacaggacagcaaagactccacatactccttgagttccaccttgacgctcagtaaggcagactacgagaagcacaaggtttatgcctgtgaagtgactcaccagggcctctctagcccagtgactaagtccttcaaccgcggggagtgtaggaagcgacgggggtcaggcgccactaacttctctctgctgaaacaagccggggacgtggaggagaatccaggtcccactagtatggactggatttggcgcatccttttccttgtcggcgctgctaccggcgcgcattccttcgaaattgtgctgacacagagccccggcacactgtcactttctccaggcgaaagagccacactgagctgtagagccagccagagcgtgtccagctcttacctggcttggtatcagcagaagcccggacaggctcccagactgctgatctacggtgcctctagcagagccacaggcatccccgatagattttctggctctggcagcggcaccgatttcaccctgaccatctccagactggaacccgaggacttcgccgtgtactattgccagcagtacggcagcagccctcctacctttggacagggcaccaaggtggaaatcaagacgcgtgcctctacaaagggaccctccgtgtttcctctggctccctgtagcagaagcaccagcgaatctacagccgctctgggctgcctggtcaaggactactttcctgagcctgtgaccgtgtcctggaacagcggagcactgacatctggcgtgcacacctttccagccgtgctccaaagcagcggcctgtactctctgagcagcgtggtcacagtgcctagctctagcctgggcaccaagacctacacctgtaatgtggaccacaagcctagcaacaccaaggtggacaagcgcgtggaatctaagtacggccctccttgtcctccatgtcctggtaccatccccgaggacacattcttcccaagccccgagagcagctgcgacgtgaagctggtggaaaagagcttcgagacagacaccaacctgaacttccagaacctgagcgtgatcggcttcagaatcctgctgctgaaagtggccggctttaacctgctgatgaccctgcggctgtggtccagccgcgccaagagaagcggatctggcgtgaagcagaccctgaatttcgacctgctgaagctggctggcgacgtggaatccaacccaggcccttctagagccaccatggactggatttggcgcatccttttccttgtcggcgctgctaccggcgcgcattccttcgaagttcagctggttgaatcaggtggcggcctggttcaacctggcggatctctgagactgtcttgtgccgccagcggcttcactttcagcggcagatccatgaactgggtccgacaggcccctggcaaaggactggaatgggtgtcctacatcagcagcgacagccggaccatctactacgccgatagcgtgaagggcagattcaccatctccagagacaacgccaagaacagcctgtacctccagatgaactccctgagagccgaggacacagccgtgtattattgtgccagaggcggccacggctacttcgatctttggggcagaggcaccctggtcaccgtttcttctacgcgtgccagcaccaagggacccagcgttttcccactggctccctgtagcagaagcaccagcgaatctacagccgctctgggctgcctggtcaaggactactttcctgagcctgtgaccgtgtcctggaacagcggagcactgacatctggcgtgcacacctttccagccgtgctgcaaagcagcggcctgtactctctgagcagcgtggtcacagtgccaagctctagcctgggcaccaagacctacacctgtaatgtggaccacaagcctagcaacaccaaggtggacaagcgcgtggaatctaagtacggacctcctgcacctccagcacctggatccggcagagccgattgcggctttaccagcgagagctaccagcagggcgtgctgagcgccaccatcctgtacgagatcctgctgggcaaggccaccctgtacgccgtgctggtgtctgccctggtgctgatggctatggtcaagcggaaggacagccggggataa

SEQ ID NO: 8788 - DNA, 2769 bp, synthetic construct
  source 1..2769: mol_type = other DNA
atggccttaccagtgaccgccttgctcctgccgctggccttgctgctccacgccgccaggccggacatccagatgacccagagcagcagctacctgagcgtgtcccttggcggcagagtgaccatcacctgtaaagccagcgaccacatcaacaactggctggcctggtatcagcagaagcctggcaacgcccctagactgctgattagcggagccacctctctggaaacaggcgtgccaagcagattttccggcagcggctctggcaaggactacaccctgagcatcaccagcctccagaccgaggatgtggctacctactactgccagcagtattggagcaccccttggacctttggcggaggcaccaagctggaaatcaaactcgagacagtggccgccccatctgtattcatctttcctccatctgatgaacagcttaagtccggcactgcttctgttgtttgcctgcttaacaatttttacccgcgggaagccaaggtgcaatggaaagtggacaacgccctgcagtctggtaacagtcaggaaagcgtgactgaacaggacagcaaagactccacatactccttgagttccaccttgacgctcagtaaggcagactacgagaagcacaaggtttatgcctgtgaagtgactcaccagggcctctctagcccagtgactaagtccttcaaccgcggggagtgtaggaagcgacgggggtcaggcgccactaacttctctctgctgaaacaagccggggacgtggaggagaatccaggtcccactagtatggactggatttggcgcatccttttccttgtcggcgctgctaccggcgcgcattccttcgaagttcagctggttgaatctggcggcggactggttcaacctggcggatctctgagactgagctgtgccgcctctggctacgcctttagcagctactgggtcaactgggttcgacaggcccctggcaaaggactggaatgggtcgcccaaatctatcccggcgacggcgacaccaactacaacggcaagttcaagggcagattcaccatcagccgggacaacagcaagaacaccctgtacctccagatgaactccctgagagccgaggacaccgccgtgtactattgtgccagatccatcaccaccgtcgtgggctgcgctatggattattggggccagggaaccctggtcaccgtgtcctctacgcgtgcctctacaaagggaccctccgtgtttcctctggctccctgtagcagaagcaccagcgaatctacagccgctctgggctgcctggtcaaggactactttcctgagcctgtgaccgtgtcctggaacagcggagcactgacatctggcgtgcacacctttccagccgtgctccaaagcagcggcctgtactctctgagcagcgtggtcacagtgcctagctctagcctgggcaccaagacctacacctgtaatgtggaccacaagcctagcaacaccaaggtggacaagcgcgtggaatctaagtacggccctccttgtcctccatgtcctggtaccatccccgaggacacattcttcccaagccccgagagcagctgcgacgtgaagctggtggaaaagagcttcgagacagacaccaacctgaacttccagaacctgagcgtgatcggcttcagaatcctgctgctgaaagtggccggctttaacctgctgatgaccctgcggctgtggtccagccgcgccaagagaagcggatctggcgtgaagcagaccctgaatttcgacctgctgaagctggctggcgacgtggaatccaacccaggcccttctagagccaccatggactggatttggcgcatccttttccttgtcggcgctgctaccggcgcgcattccttcgaacaagttcagcttcaacagcctggcgctgagctggtcaaacctggcgcttctgtgaagatgagctgcaaagccagcggctacgccttcagcagctactggatcaactggatgaagcagaaacccggccagggactcgaatggatcggccaaatctatcccggcgacggcgacaccaactacaacggcaagttcaagggcagagccacactgaccgccgatacctctagcagcacagcctacatgcagctgagcagcctgaccagcgaagatagcgccgtgtacttctgtgcccggtccatcacaacagtcgtgggctgcgctatggactattggggccagggaacaagcgtgaccgtgtctagtacgcgtgccagcaccaagggacccagcgttttcccactggctccctgtagcagaagcaccagcgaatctacagccgctctgggctgcctggtcaaggactactttcctgagcctgtgaccgtgtcctggaacagcggagcactgacatctggcgtgcacacctttccagccgtgctgcaaagcagcggcctgtactctctgagcagcgtggtcacagtgccaagctctagcctgggcaccaagacctacacctgtaatgtggaccacaagcctagcaacaccaaggtggacaagcgcgtggaatctaagtacggacctcctgcacctccagcacctggatccggcagagccgattgcggctttaccagcgagagctaccagcagggcgtgctgagcgccaccatcctgtacgagatcctgctgggcaaggccaccctgtacgccgtgctggtgtctgccctggtgctgatggctatggtcaagcggaaggacagccggggataa

SEQ ID NO: 8789 - DNA, 2775 bp, synthetic construct
  source 1..2775: mol_type = other DNA
atggccttaccagtgaccgccttgctcctgccgctggccttgctgctccacgccgccaggccggacatccagatgacccagagcagcagctacctgagcgtgtcccttggcggcagagtgaccatcacctgtaaagccagcgaccacatcaacaactggctggcctggtatcagcagaagcctggcaacgcccctagactgctgattagcggagccacctctctggaaacaggcgtgccaagcagattttccggcagcggctctggcaaggactacaccctgagcatcaccagcctccagaccgaggatgtggctacctactactgccagcagtattggagcaccccttggacctttggcggaggcaccaagctggaaatcaaactcgagacagtggccgccccatctgtattcatctttcctccatctgatgaacagcttaagtccggcactgcttctgttgtttgcctgcttaacaatttttacccgcgggaagccaaggtgcaatggaaagtggacaacgccctgcagtctggtaacagtcaggaaagcgtgactgaacaggacagcaaagactccacatactccttgagttccaccttgacgctcagtaaggcagactacgagaagcacaaggtttatgcctgtgaagtgactcaccagggcctctctagcccagtgactaagtccttcaaccgcggggagtgtaggaagcgacgggggtcaggcgccactaacttctctctgctgaaacaagccggggacgtggaggagaatccaggtcccactagtatggactggatttggcgcatccttttccttgtcggcgctgctaccggcgcgcattccttcgaacaggttcagctccagcagtctggcgctgagcttgctagacctggcgcttctgtgaagctgagctgcaaggccagcggctacaccttcaccagctactggatgcagtgggtcaagcagaggccaggccaaggactggaatggatcggagccatctatcccggcgacggcgataccagatacacccagaagttcaagggcaaagccacactgaccgccgacaagagcagctccacagcctacatgcaactgagcagcctggcttccgaggacagcgccgtgtactattgtgccagaggcaaggtgtactacggcagcaaccctttcgcctattggggccagggaaccctggttacagtgtctgctacgcgtgcctctacaaagggaccctccgtgtttcctctggctccctgtagcagaagcaccagcgaatctacagccgctctgggctgcctggtcaaggactactttcctgagcctgtgaccgtgtcctggaacagcggagcactgacatctggcgtgcacacctttccagccgtgctccaaagcagcggcctgtactctctgagcagcgtggtcacagtgcctagctctagcctgggcaccaagacctacacctgtaatgtggaccacaagcctagcaacaccaaggtggacaagcgcgtgggtaccgaagtgaaaaccgactccaccgaccacgtgaagcccaaagagacagagaacaccaagcagcccagcaagagctgccacaagcccaaggccatcgtgcacaccgagaaagtgaacatgatgagcctgaccgtgctgggcttcagaatcctgctgctgaaagtggccggctttaacctgctgatgaccctgcggctgtggtccagccgcgccaagagaagcggatctggcgtgaagcagaccctgaatttcgacctgctgaagctggctggcgacgtggaatccaacccaggcccttctagagccaccatggactggatttggcgcatccttttccttgtcggcgctgctaccggcgcgcattccttcgaacaggttcagctccagcagtctggcgctgagcttgctagacctggcgcttctgtgaagctgagctgcaaggccagcggctacaccttcaccagctactggatgcagtgggtcaagcagaggccaggccaaggactggaatggatcggagccatctatcccggcgacggcgataccagatacacccagaagttcaagggcaaagccacactgaccgccgacaagagcagctccacagcctacatgcaactgagcagcctggcttccgaggacagcgccgtgtactattgtgccagaggcaaggtgtactacggcagcaaccctttcgcctattggggccagggaaccctggttacagtgtctgctacgcgtgccagcaccaagggacccagcgttttcccactggctccctgtagcagaagcaccagcgaatctacagccgctctgggctgcctggtcaaggactactttcctgagcctgtgaccgtgtcctggaacagcggagcactgacatctggcgtgcacacctttccagccgtgctgcaaagcagcggcctgtactctctgagcagcgtggtcacagtgccaagctctagcctgggcaccaagacctacacctgtaatgtggaccacaagcctagcaacaccaaggtggacaagcgcgtggaatctaagtacggatcccccatcaagaccgatgtgattacaatggaccccaaggacaactgctccaaggacgccaacgataccctgctgctccagctgaccaacaccagcgcctactacatgtacgagatcctgctgggcaaggccaccctgtacgccgtgctggtgtctgccctggtgctgatggctatggtcaagcggaaggacagccggggataa

SEQ ID NO: 8790 - DNA, 2796 bp, synthetic construct
  source 1..2796: mol_type = other DNA
atggccttaccagtgaccgccttgctcctgccgctggccttgctgctccacgccgccaggccggacatccagatgacccagagcagcagctacctgagcgtgtcccttggcggcagagtgaccatcacctgtaaagccagcgaccacatcaacaactggctggcctggtatcagcagaagcctggcaacgcccctagactgctgattagcggagccacctctctggaaacaggcgtgccaagcagattttccggcagcggctctggcaaggactacaccctgagcatcaccagcctccagaccgaggatgtggctacctactactgccagcagtattggagcaccccttggacctttggcggaggcaccaagctggaaatcaaactcgagacagtggccgccccatctgtattcatctttcctccatctgatgaacagcttaagtccggcactgcttctgttgtttgcctgcttaacaatttttacccgcgggaagccaaggtgcaatggaaagtggacaacgccctgcagtctggtaacagtcaggaaagcgtgactgaacaggacagcaaagactccacatactccttgagttccaccttgacgctcagtaaggcagactacgagaagcacaaggtttatgcctgtgaagtgactcaccagggcctctctagcccagtgactaagtccttcaaccgcggggagtgtaggaagcgacgggggtcaggcgccactaacttctctctgctgaaacaagccggggacgtggaggagaatccaggtcccactagtatggactggatttggcgcatccttttccttgtcggcgctgctaccggcgcgcattccttcgaagttcagctggttgaatctggcggcggactggttcaacctggcggatctctgagactgagctgtgccgcctctggctacgcctttagcagctactgggtcaactgggttcgacaggcccctggcaaaggactggaatgggtcgcccaaatctatcccggcgacggcgacaccaactacaacggcaagttcaagggcagattcaccatcagccgggacaacagcaagaacaccctgtacctccagatgaactccctgagagccgaggacaccgccgtgtactattgtgccagatccatcaccaccgtcgtgggctgcgctatggattattggggccagggaaccctggtcaccgtgtcctctacgcgtgcctctacaaagggaccctccgtgtttcctctggctccctgtagcagaagcaccagcgaatctacagccgctctgggctgcctggtcaaggactactttcctgagcctgtgaccgtgtcctggaacagcggagcactgacatctggcgtgcacacctttccagccgtgctccaaagcagcggcctgtactctctgagcagcgtggtcacagtgcctagctctagcctgggcaccaagacctacacctgtaatgtggaccacaagcctagcaacaccaaggtggacaagcgcgtgggtaccgaagtgaaaaccgactccaccgaccacgtgaagcccaaagagacagagaacaccaagcagcccagcaagagctgccacaagcccaaggccatcgtgcacaccgagaaagtgaacatgatgagcctgaccgtgctgggcttcagaatcctgctgctgaaagtggccggctttaacctgctgatgaccctgcggctgtggtccagccgcgccaagagaagcggatctggcgtgaagcagaccctgaatttcgacctgctgaagctggctggcgacgtggaatccaacccaggcccttctagagccaccatggactggatttggcgcatccttttccttgtcggcgctgctaccggcgcgcattccttcgaacaggttcagctccagcagtctggcgctgagcttgctagacctggcgcttctgtgaagctgagctgcaaggccagcggctacaccttcaccagctactggatgcagtgggtcaagcagaggccaggccaaggactggaatggatcggagccatctatcccggcgacggcgataccagatacacccagaagttcaagggcaaagccacactgaccgccgacaagagcagctccacagcctacatgcaactgagcagcctggcttccgaggacagcgccgtgtactattgtgccagaggcaaggtgtactacggcagcaaccctttcgcctattggggccagggaaccctggttacagtgtctgctacgcgtgccagcaccaagggacccagcgttttcccactggctccctgtagcagaagcaccagcgaatctacagccgctctgggctgcctggtcaaggactactttcctgagcctgtgaccgtgtcctggaacagcggagcactgacatctggcgtgcacacctttccagccgtgctgcaaagcagcggcctgtactctctgagcagcgtggtcacagtgccaagctctagcctgggcaccaagacctacacctgtaatgtggaccacaagcctagcaacaccaaggtggacaagcgcgtggaatctaagtacggacctcctgcacctccagcacctggatcccccatcaagaccgatgtgattacaatggaccccaaggacaactgctccaaggacgccaacgataccctgctgctccagctgaccaacaccagcgccaccatcctgtacgagatcctgctgggcaaggccaccctgtacgccgtgctggtgtctgccctggtgctgatggctatggtcaagcggaaggacagccggggataa

SEQ ID NO: 8791 - DNA, 2775 bp, synthetic construct
  source 1..2775: mol_type = other DNA
atggccttaccagtgaccgccttgctcctgccgctggccttgctgctccacgccgccaggccggacatccagatgacccagagcagcagctacctgagcgtgtcccttggcggcagagtgaccatcacctgtaaagccagcgaccacatcaacaactggctggcctggtatcagcagaagcctggcaacgcccctagactgctgattagcggagccacctctctggaaacaggcgtgccaagcagattttccggcagcggctctggcaaggactacaccctgagcatcaccagcctccagaccgaggatgtggctacctactactgccagcagtattggagcaccccttggacctttggcggaggcaccaagctggaaatcaaactcgagacagtggccgccccatctgtattcatctttcctccatctgatgaacagcttaagtccggcactgcttctgttgtttgcctgcttaacaatttttacccgcgggaagccaaggtgcaatggaaagtggacaacgccctgcagtctggtaacagtcaggaaagcgtgactgaacaggacagcaaagactccacatactccttgagttccaccttgacgctcagtaaggcagactacgagaagcacaaggtttatgcctgtgaagtgactcaccagggcctctctagcccagtgactaagtccttcaaccgcggggagtgtaggaagcgacgggggtcaggcgccactaacttctctctgctgaaacaagccggggacgtggaggagaatccaggtcccactagtatggactggatttggcgcatccttttccttgtcggcgctgctaccggcgcgcattccttcgaacaagttcagcttcaacagcctggcgctgagctggtcaaacctggcgcttctgtgaagatgagctgcaaagccagcggctacgccttcagcagctactggatcaactggatgaagcagaaacccggccagggactcgaatggatcggccaaatctatcccggcgacggcgacaccaactacaacggcaagttcaagggcagagccacactgaccgccgatacctctagcagcacagcctacatgcagctgagcagcctgaccagcgaagatagcgccgtgtacttctgtgcccggtccatcacaacagtcgtgggctgcgctatggactattggggccagggaacaagcgtgaccgtgtctagtacgcgtgcctctacaaagggaccctccgtgtttcctctggctccctgtagcagaagcaccagcgaatctacagccgctctgggctgcctggtcaaggactactttcctgagcctgtgaccgtgtcctggaacagcggagcactgacatctggcgtgcacacctttccagccgtgctccaaagcagcggcctgtactctctgagcagcgtggtcacagtgcctagctctagcctgggcaccaagacctacacctgtaatgtggaccacaagcctagcaacaccaaggtggacaagcgcgtgggtaccgaagtgaaaaccgactccaccgaccacgtgaagcccaaagagacagagaacaccaagcagcccagcaagagctgccacaagcccaaggccatcgtgcacaccgagaaagtgaacatgatgagcctgaccgtgctgggcttcagaatcctgctgctgaaagtggccggctttaacctgctgatgaccctgcggctgtggtccagccgcgccaagagaagcggatctggcgtgaagcagaccctgaatttcgacctgctgaagctggctggcgacgtggaatccaacccaggcccttctagagccaccatggactggatttggcgcatccttttccttgtcggcgctgctaccggcgcgcattccttcgaacaggttcagctccagcagtctggcgctgagcttgctagacctggcgcttctgtgaagctgagctgcaaggccagcggctacaccttcaccagctactggatgcagtgggtcaagcagaggccaggccaaggactggaatggatcggagccatctatcccggcgacggcgataccagatacacccagaagttcaagggcaaagccacactgaccgccgacaagagcagctccacagcctacatgcaactgagcagcctggcttccgaggacagcgccgtgtactattgtgccagaggcaaggtgtactacggcagcaaccctttcgcctattggggccagggaaccctggttacagtgtctgctacgcgtgccagcaccaagggacccagcgttttcccactggctccctgtagcagaagcaccagcgaatctacagccgctctgggctgcctggtcaaggactactttcctgagcctgtgaccgtgtcctggaacagcggagcactgacatctggcgtgcacacctttccagccgtgctgcaaagcagcggcctgtactctctgagcagcgtggtcacagtgccaagctctagcctgggcaccaagacctacacctgtaatgtggaccacaagcctagcaacaccaaggtggacaagcgcgtggaatctaagtacggatcccccatcaagaccgatgtgattacaatggaccccaaggacaactgctccaaggacgccaacgataccctgctgctccagctgaccaacaccagcgcctactacatgtacgagatcctgctgggcaaggccaccctgtacgccgtgctggtgtctgccctggtgctgatggctatggtcaagcggaaggacagccggggataa

SEQ ID NO: 8792 - DNA, 2772 bp, synthetic construct
  source 1..2772: mol_type = other DNA
atggccttaccagtgaccgccttgctcctgccgctggccttgctgctccacgccgccaggccggacatccagatgacacagagccctagcagcctgtctgccagcgtgggagacagagtgaccatcacatgcaaggccagcgaccacatcaacaactggctggcctggtatcagcagaagcctggcaaggcccctaagctgctgatctacggcgctaccacactggaaacaggcgtgcccagcagattttctggcagcggctctggcaccgacttcaccctgacaatatccagcctccagcctgaggacttcgccacctactactgtcagcagagctggaacaccccttggacattcggccagggcaccaaggtggaaatcaagagactcgagacagtggccgccccatctgtattcatctttcctccatctgatgaacagcttaagtccggcactgcttctgttgtttgcctgcttaacaatttttacccgcgggaagccaaggtgcaatggaaagtggacaacgccctgcagtctggtaacagtcaggaaagcgtgactgaacaggacagcaaagactccacatactccttgagttccaccttgacgctcagtaaggcagactacgagaagcacaaggtttatgcctgtgaagtgactcaccagggcctctctagcccagtgactaagtccttcaaccgcggggagtgtaggaagcgacgggggtcaggcgccactaacttctctctgctgaaacaagccggggacgtggaggagaatccaggtcccactagtatggactggatttggcgcatccttttccttgtcggcgctgctaccggcgcgcattccttcgaacaagttcagcttcaacagcctggcgctgagctggtcaaacctggcgcttctgtgaagatgagctgcaaagccagcggctacgccttcagcagctactggatcaactggatgaagcagaaacccggccagggactcgaatggatcggccaaatctatcccggcgacggcgacaccaactacaacggcaagttcaagggcagagccacactgaccgccgatacctctagcagcacagcctacatgcagctgagcagcctgaccagcgaagatagcgccgtgtacttctgtgcccggtccatcacaacagtcgtgggctgcgctatggactattggggccagggaacaagcgtgaccgtgtctagtacgcgtgcctctacaaagggaccctccgtgtttcctctggctccctgtagcagaagcaccagcgaatctacagccgctctgggctgcctggtcaaggactactttcctgagcctgtgaccgtgtcctggaacagcggagcactgacatctggcgtgcacacctttccagccgtgctccaaagcagcggcctgtactctctgagcagcgtggtcacagtgcctagctctagcctgggcaccaagacctacacctgtaatgtggaccacaagcctagcaacaccaaggtggacaagcgcgtggaatctaagtacggccctccttgtcctccatgtcctggtaccatccccgaggacacattcttcccaagccccgagagcagctgcgacgtgaagctggtggaaaagagcttcgagacagacaccaacctgaacttccagaacctgagcgtgatcggcttcagaatcctgctgctgaaagtggccggctttaacctgctgatgaccctgcggctgtggtccagccgcgccaagagaagcggatctggcgtgaagcagaccctgaatttcgacctgctgaagctggctggcgacgtggaatccaacccaggcccttctagagccaccatggactggatttggcgcatccttttccttgtcggcgctgctaccggcgcgcattccttcgaagttcagctggttgaatctggcggcggactggttcaacctggcggatctctgagactgagctgtgccgcctctggctacgcctttagcagctactgggtcaactgggttcgacaggcccctggcaaaggactggaatgggtcgcccaaatctatcccggcgacggcgacaccaactacaacggcaagttcaagggcagattcaccatcagccgggacaacagcaagaacaccctgtacctccagatgaactccctgagagccgaggacaccgccgtgtactattgtgccagatccatcaccaccgtcgtgggctgcgctatggattattggggccagggaaccctggtcaccgtgtcctctacgcgtgccagcaccaagggacccagcgttttcccactggctccctgtagcagaagcaccagcgaatctacagccgctctgggctgcctggtcaaggactactttcctgagcctgtgaccgtgtcctggaacagcggagcactgacatctggcgtgcacacctttccagccgtgctgcaaagcagcggcctgtactctctgagcagcgtggtcacagtgccaagctctagcctgggcaccaagacctacacctgtaatgtggaccacaagcctagcaacaccaaggtggacaagcgcgtggaatctaagtacggacctcctgcacctccagcacctggatccggcagagccgattgcggctttaccagcgagagctaccagcagggcgtgctgagcgccaccatcctgtacgagatcctgctgggcaaggccaccctgtacgccgtgctggtgtctgccctggtgctgatggctatggtcaagcggaaggacagccggggataa

SEQ ID NO: 8793 - DNA, 2775 bp, synthetic construct
  source 1..2775: mol_type = other DNA
atggccttaccagtgaccgccttgctcctgccgctggccttgctgctccacgccgccaggccggacatccagatgacacagagccctagcagcctgtctgccagcgtgggagacagagtgaccatcacatgcaaggccagcgaccacatcaacaactggctggcctggtatcagcagaagcctggcaaggcccctaagctgctgatctacggcgctaccacactggaaacaggcgtgcccagcagattttctggcagcggctctggcaccgacttcaccctgacaatatccagcctccagcctgaggacttcgccacctactactgtcagcagagctggaacaccccttggacattcggccagggcaccaaggtggaaatcaagagactcgagacagtggccgccccatctgtattcatctttcctccatctgatgaacagcttaagtccggcactgcttctgttgtttgcctgcttaacaatttttacccgcgggaagccaaggtgcaatggaaagtggacaacgccctgcagtctggtaacagtcaggaaagcgtgactgaacaggacagcaaagactccacatactccttgagttccaccttgacgctcagtaaggcagactacgagaagcacaaggtttatgcctgtgaagtgactcaccagggcctctctagcccagtgactaagtccttcaaccgcggggagtgtaggaagcgacgggggtcaggcgccactaacttctctctgctgaaacaagccggggacgtggaggagaatccaggtcccactagtatggactggatttggcgcatccttttccttgtcggcgctgctaccggcgcgcattccttcgaacaagttcagcttcaacagcctggcgctgagctggtcaaacctggcgcttctgtgaagatgagctgcaaagccagcggctacgccttcagcagctactggatcaactggatgaagcagaaacccggccagggactcgaatggatcggccaaatctatcccggcgacggcgacaccaactacaacggcaagttcaagggcagagccacactgaccgccgatacctctagcagcacagcctacatgcagctgagcagcctgaccagcgaagatagcgccgtgtacttctgtgcccggtccatcacaacagtcgtgggctgcgctatggactattggggccagggaacaagcgtgaccgtgtctagtacgcgtgcctctacaaagggaccctccgtgtttcctctggctccctgtagcagaagcaccagcgaatctacagccgctctgggctgcctggtcaaggactactttcctgagcctgtgaccgtgtcctggaacagcggagcactgacatctggcgtgcacacctttccagccgtgctccaaagcagcggcctgtactctctgagcagcgtggtcacagtgcctagctctagcctgggcaccaagacctacacctgtaatgtggaccacaagcctagcaacaccaaggtggacaagcgcgtggaatctaagtacggccctccttgtcctccatgtcctggtaccatccccgaggacacattcttcccaagccccgagagcagctgcgacgtgaagctggtggaaaagagcttcgagacagacaccaacctgaacttccagaacctgagcgtgatcggcttcagaatcctgctgctgaaagtggccggctttaacctgctgatgaccctgcggctgtggtccagccgcgccaagagaagcggatctggcgtgaagcagaccctgaatttcgacctgctgaagctggctggcgacgtggaatccaacccaggcccttctagagccaccatggactggatttggcgcatccttttccttgtcggcgctgctaccggcgcgcattccttcgaacaagttcagcttcaacagcctggcgctgagctggtcaaacctggcgcttctgtgaagatgagctgcaaagccagcggctacgccttcagcagctactggatcaactggatgaagcagaaacccggccagggactcgaatggatcggccaaatctatcccggcgacggcgacaccaactacaacggcaagttcaagggcagagccacactgaccgccgatacctctagcagcacagcctacatgcagctgagcagcctgaccagcgaagatagcgccgtgtacttctgtgcccggtccatcacaacagtcgtgggctgcgctatggactattggggccagggaacaagcgtgaccgtgtctagtacgcgtgccagcaccaagggacccagcgttttcccactggctccctgtagcagaagcaccagcgaatctacagccgctctgggctgcctggtcaaggactactttcctgagcctgtgaccgtgtcctggaacagcggagcactgacatctggcgtgcacacctttccagccgtgctgcaaagcagcggcctgtactctctgagcagcgtggtcacagtgccaagctctagcctgggcaccaagacctacacctgtaatgtggaccacaagcctagcaacaccaaggtggacaagcgcgtggaatctaagtacggacctcctgcacctccagcacctggatccggcagagccgattgcggctttaccagcgagagctaccagcagggcgtgctgagcgccaccatcctgtacgagatcctgctgggcaaggccaccctgtacgccgtgctggtgtctgccctggtgctgatggctatggtcaagcggaaggacagccggggataa

SEQ ID NO: 8794 - DNA, 2772 bp, synthetic construct
  source 1..2772: mol_type = other DNA
atggccttaccagtgaccgccttgctcctgccgctggccttgctgctccacgccgccaggccggacatccagatgacccagagcagcagctacctgagcgtgtcccttggcggcagagtgaccatcacctgtaaagccagcgaccacatcaacaactggctggcctggtatcagcagaagcctggcaacgcccctagactgctgattagcggagccacctctctggaaacaggcgtgccaagcagattttccggcagcggctctggcaaggactacaccctgagcatcaccagcctccagaccgaggatgtggctacctactactgccagcagtattggagcaccccttggacctttggcggaggcaccaagctggaaatcaaactcgagacagtggccgccccatctgtattcatctttcctccatctgatgaacagcttaagtccggcactgcttctgttgtttgcctgcttaacaatttttacccgcgggaagccaaggtgcaatggaaagtggacaacgccctgcagtctggtaacagtcaggaaagcgtgactgaacaggacagcaaagactccacatactccttgagttccaccttgacgctcagtaaggcagactacgagaagcacaaggtttatgcctgtgaagtgactcaccagggcctctctagcccagtgactaagtccttcaaccgcggggagtgtaggaagcgacgggggtcaggcgccactaacttctctctgctgaaacaagccggggacgtggaggagaatccaggtcccactagtatggactggatttggcgcatccttttccttgtcggcgctgctaccggcgcgcattccttcgaacaagttcagcttcaacagcctggcgctgagctggtcaaacctggcgcttctgtgaagatgagctgcaaagccagcggctacgccttcagcagctactggatcaactggatgaagcagaaacccggccagggactcgaatggatcggccaaatctatcccggcgacggcgacaccaactacaacggcaagttcaagggcagagccacactgaccgccgatacctctagcagcacagcctacatgcagctgagcagcctgaccagcgaagatagcgccgtgtacttctgtgcccggtccatcacaacagtcgtgggctgcgctatggactattggggccagggaacaagcgtgaccgtgtctagtacgcgtgcctctacaaagggaccctccgtgtttcctctggctccctgtagcagaagcaccagcgaatctacagccgctctgggctgcctggtcaaggactactttcctgagcctgtgaccgtgtcctggaacagcggagcactgacatctggcgtgcacacctttccagccgtgctccaaagcagcggcctgtactctctgagcagcgtggtcacagtgcctagctctagcctgggcaccaagacctacacctgtaatgtggaccacaagcctagcaacaccaaggtggacaagcgcgtggaatctaagtacggccctccttgtcctccatgtcctggtaccatccccgaggacacattcttcccaagccccgagagcagctgcgacgtgaagctggtggaaaagagcttcgagacagacaccaacctgaacttccagaacctgagcgtgatcggcttcagaatcctgctgctgaaagtggccggctttaacctgctgatgaccctgcggctgtggtccagccgcgccaagagaagcggatctggcgtgaagcagaccctgaatttcgacctgctgaagctggctggcgacgtggaatccaacccaggcccttctagagccaccatggactggatttggcgcatccttttccttgtcggcgctgctaccggcgcgcattccttcgaacaagttcagcttcaacagcctggcgctgagctggtcaaacctggcgcttctgtgaagatgagctgcaaagccagcggctacgccttcagcagctactggatcaactggatgaagcagaaacccggccagggactcgaatggatcggccaaatctatcccggcgacggcgacaccaactacaacggcaagttcaagggcagagccacactgaccgccgatacctctagcagcacagcctacatgcagctgagcagcctgaccagcgaagatagcgccgtgtacttctgtgcccggtccatcacaacagtcgtgggctgcgctatggactattggggccagggaacaagcgtgaccgtgtctagtacgcgtgccagcaccaagggacccagcgttttcccactggctccctgtagcagaagcaccagcgaatctacagccgctctgggctgcctggtcaaggactactttcctgagcctgtgaccgtgtcctggaacagcggagcactgacatctggcgtgcacacctttccagccgtgctgcaaagcagcggcctgtactctctgagcagcgtggtcacagtgccaagctctagcctgggcaccaagacctacacctgtaatgtggaccacaagcctagcaacaccaaggtggacaagcgcgtggaatctaagtacggacctcctgcacctccagcacctggatccggcagagccgattgcggctttaccagcgagagctaccagcagggcgtgctgagcgccaccatcctgtacgagatcctgctgggcaaggccaccctgtacgccgtgctggtgtctgccctggtgctgatggctatggtcaagcggaaggacagccggggataa

SEQ ID NO: 8795 - DNA, 2799 bp, synthetic construct
  source 1..2799: mol_type = other DNA
atggccttaccagtgaccgccttgctcctgccgctggccttgctgctccacgccgccaggccggacatccagatgacccagagcagcagctacctgagcgtgtcccttggcggcagagtgaccatcacctgtaaagccagcgaccacatcaacaactggctggcctggtatcagcagaagcctggcaacgcccctagactgctgattagcggagccacctctctggaaacaggcgtgccaagcagattttccggcagcggctctggcaaggactacaccctgagcatcaccagcctccagaccgaggatgtggctacctactactgccagcagtattggagcaccccttggacctttggcggaggcaccaagctggaaatcaaactcgagacagtggccgccccatctgtattcatctttcctccatctgatgaacagcttaagtccggcactgcttctgttgtttgcctgcttaacaatttttacccgcgggaagccaaggtgcaatggaaagtggacaacgccctgcagtctggtaacagtcaggaaagcgtgactgaacaggacagcaaagactccacatactccttgagttccaccttgacgctcagtaaggcagactacgagaagcacaaggtttatgcctgtgaagtgactcaccagggcctctctagcccagtgactaagtccttcaaccgcggggagtgtaggaagcgacgggggtcaggcgccactaacttctctctgctgaaacaagccggggacgtggaggagaatccaggtcccactagtatggactggatttggcgcatccttttccttgtcggcgctgctaccggcgcgcattccttcgaacaggttcagctccagcagtctggcgctgagcttgctagacctggcgcttctgtgaagctgagctgcaaggccagcggctacaccttcaccagctactggatgcagtgggtcaagcagaggccaggccaaggactggaatggatcggagccatctatcccggcgacggcgataccagatacacccagaagttcaagggcaaagccacactgaccgccgacaagagcagctccacagcctacatgcaactgagcagcctggcttccgaggacagcgccgtgtactattgtgccagaggcaaggtgtactacggcagcaaccctttcgcctattggggccagggaaccctggttacagtgtctgctacgcgtgcctctacaaagggaccctccgtgtttcctctggctccctgtagcagaagcaccagcgaatctacagccgctctgggctgcctggtcaaggactactttcctgagcctgtgaccgtgtcctggaacagcggagcactgacatctggcgtgcacacctttccagccgtgctccaaagcagcggcctgtactctctgagcagcgtggtcacagtgcctagctctagcctgggcaccaagacctacacctgtaatgtggaccacaagcctagcaacaccaaggtggacaagcgcgtgggtaccgaagtgaaaaccgactccaccgaccacgtgaagcccaaagagacagagaacaccaagcagcccagcaagagctgccacaagcccaaggccatcgtgcacaccgagaaagtgaacatgatgagcctgaccgtgctgggcttcagaatcctgctgctgaaagtggccggctttaacctgctgatgaccctgcggctgtggtccagccgcgccaagagaagcggatctggcgtgaagcagaccctgaatttcgacctgctgaagctggctggcgacgtggaatccaacccaggcccttctagagccaccatggactggatttggcgcatccttttccttgtcggcgctgctaccggcgcgcattccttcgaacaggttcagctccagcagtctggcgctgagcttgctagacctggcgcttctgtgaagctgagctgcaaggccagcggctacaccttcaccagctactggatgcagtgggtcaagcagaggccaggccaaggactggaatggatcggagccatctatcccggcgacggcgataccagatacacccagaagttcaagggcaaagccacactgaccgccgacaagagcagctccacagcctacatgcaactgagcagcctggcttccgaggacagcgccgtgtactattgtgccagaggcaaggtgtactacggcagcaaccctttcgcctattggggccagggaaccctggttacagtgtctgctacgcgtgccagcaccaagggacccagcgttttcccactggctccctgtagcagaagcaccagcgaatctacagccgctctgggctgcctggtcaaggactactttcctgagcctgtgaccgtgtcctggaacagcggagcactgacatctggcgtgcacacctttccagccgtgctgcaaagcagcggcctgtactctctgagcagcgtggtcacagtgccaagctctagcctgggcaccaagacctacacctgtaatgtggaccacaagcctagcaacaccaaggtggacaagcgcgtggaatctaagtacggacctcctgcacctccagcacctggatcccccatcaagaccgatgtgattacaatggaccccaaggacaactgctccaaggacgccaacgataccctgctgctccagctgaccaacaccagcgccaccatcctgtacgagatcctgctgggcaaggccaccctgtacgccgtgctggtgtctgccctggtgctgatggctatggtcaagcggaaggacagccggggataa

SEQ ID NO: 8796 - DNA, 2760 bp, synthetic construct
  source 1..2760: mol_type = other DNA
atggccttaccagtgaccgccttgctcctgccgctggccttgctgctccacgccgccaggccggacatccagatgacacagagccctagcagcctgtctgccagcgtgggagacagagtgaccatcacctgtagagccagccaggacatcagcaactacctgaactggtatcagcagaaacccggcaaggccgtgaagctgctgatctactacaccagcatcctgcacagcggcgtgcccagcagattttctggctctggcagcggcaccgactacaccctgacaatatctagcctccagcctgaggacttcgctacctacttctgccagcaaggcaacaccctgccttggacatttggcggaggcaccaaggtggaaatcaaactcgagacagtggccgccccatctgtattcatctttcctccatctgatgaacagcttaagtccggcactgcttctgttgtttgcctgcttaacaatttttacccgcgggaagccaaggtgcaatggaaagtggacaacgccctgcagtctggtaacagtcaggaaagcgtgactgaacaggacagcaaagactccacatactccttgagttccaccttgacgctcagtaaggcagactacgagaagcacaaggtttatgcctgtgaagtgactcaccagggcctctctagcccagtgactaagtccttcaaccgcggggagtgtaggaagcgacgggggtcaggcgccactaacttctctctgctgaaacaagccggggacgtggaggagaatccaggtcccactagtatggactggatttggcgcatccttttccttgtcggcgctgctaccggcgcgcattccttcgaagtgcagctggttgagtctggcggcggacttgtgaaacctggcggaagcctgaagctgagctgtgccgcttctggcttcgccttcagcatctacgacatgagctgggtccgacaggcccctggcaaaggacttgagtgggtcgcctacatcagctctggcggagggacaacctactatcccgacaccgtgaagggcagattcaccatcagccgggacaacgccaagaacaccctgtacctccagatgagcagcctgagagccgaggacaccgccatgtactactgtgccagacacagcggctacggcagctcttacggcgtgctgtttgcctattggggccagggcacactggtcaccgttagctctacgcgtgcctctacaaagggaccctccgtgtttcctctggctccctgtagcagaagcaccagcgaatctacagccgctctgggctgcctggtcaaggactactttcctgagcctgtgaccgtgtcctggaacagcggagcactgacatctggcgtgcacacctttccagccgtgctccaaagcagcggcctgtactctctgagcagcgtggtcacagtgcctagctctagcctgggcaccaagacctacacctgtaatgtggaccacaagcctagcaacaccaaggtggacaagcgcgtggaatctaagtacggccctccttgtcctccatgtcctggtaccatccccgaggacacattcttcccaagccccgagagcagctgcgacgtgaagctggtggaaaagagcttcgagacagacaccaacctgaacttccagaacctgagcgtgatcggcttcagaatcctgctgctgaaagtggccggctttaacctgctgatgaccctgcggctgtggtccagccgcgccaagagaagcggatctggcgtgaagcagaccctgaatttcgacctgctgaagctggctggcgacgtggaatccaacccaggcccttctagagccaccatggactggatttggcgcatccttttccttgtcggcgctgctaccggcgcgcattccttcgaagtgcagctggttgaatcaggtggcggcctggttcaacctggcggatctctgagactgagctgtgccgccagcggcttcaccttcagcgactactttatgagctgggtccgacaggcccctggcaaaggacttgaatgggtcgccaccatcagcaatggcggcacctacacttactaccccgacagcgtgaagggcagattcaccatctccagagacaacagcaagaacaccctgtacctccagatgaactccctgagagccgaggacaccgccgtgtactactgcgccagattcgacggctacatcttcgactattggggccagggcaccctggtcacagtctcttctacgcgtgccagcaccaagggacccagcgttttcccactggctccctgtagcagaagcaccagcgaatctacagccgctctgggctgcctggtcaaggactactttcctgagcctgtgaccgtgtcctggaacagcggagcactgacatctggcgtgcacacctttccagccgtgctgcaaagcagcggcctgtactctctgagcagcgtggtcacagtgccaagctctagcctgggcaccaagacctacacctgtaatgtggaccacaagcctagcaacaccaaggtggacaagcgcgtggaatctaagtacggacctcctgcacctccagcacctggatccggcagagccgattgcggctttaccagcgagagctaccagcagggcgtgctgagcgccaccatcctgtacgagatcctgctgggcaaggccaccctgtacgccgtgctggtgtctgccctggtgctgatggctatggtcaagcggaaggacagccggggataa

SEQ ID NO: 8797 - DNA, 2772 bp, synthetic construct
  source 1..2772: mol_type = other DNA
atggccttaccagtgaccgccttgctcctgccgctggccttgctgctccacgccgccaggccggacatccagatgacccagagcagcagctacctgagcgtgtcccttggcggcagagtgaccatcacctgtaaagccagcgaccacatcaacaactggctggcctggtatcagcagaagcctggcaacgcccctagactgctgattagcggagccacctctctggaaacaggcgtgccaagcagattttccggcagcggctctggcaaggactacaccctgagcatcaccagcctccagaccgaggatgtggctacctactactgccagcagtattggagcaccccttggacctttggcggaggcaccaagctggaaatcaaactcgagacagtggccgccccatctgtattcatctttcctccatctgatgaacagcttaagtccggcactgcttctgttgtttgcctgcttaacaatttttacccgcgggaagccaaggtgcaatggaaagtggacaacgccctgcagtctggtaacagtcaggaaagcgtgactgaacaggacagcaaagactccacatactccttgagttccaccttgacgctcagtaaggcagactacgagaagcacaaggtttatgcctgtgaagtgactcaccagggcctctctagcccagtgactaagtccttcaaccgcggggagtgtaggaagcgacgggggtcaggcgccactaacttctctctgctgaaacaagccggggacgtggaggagaatccaggtcccactagtatggactggatttggcgcatccttttccttgtcggcgctgctaccggcgcgcattccttcgaagttcagctggttgaatctggcggcggactggttcaacctggcggatctctgagactgagctgtgccgcctctggctacgcctttagcagctactgggtcaactgggttcgacaggcccctggcaaaggactggaatgggtcgcccaaatctatcccggcgacggcgacaccaactacaacggcaagttcaagggcagattcaccatcagccgggacaacagcaagaacaccctgtacctccagatgaactccctgagagccgaggacaccgccgtgtactattgtgccagatccatcaccaccgtcgtgggctgcgctatggattattggggccagggaaccctggtcaccgtgtcctctacgcgtgcctctacaaagggaccctccgtgtttcctctggctccctgtagcagaagcaccagcgaatctacagccgctctgggctgcctggtcaaggactactttcctgagcctgtgaccgtgtcctggaacagcggagcactgacatctggcgtgcacacctttccagccgtgctccaaagcagcggcctgtactctctgagcagcgtggtcacagtgcctagctctagcctgggcaccaagacctacacctgtaatgtggaccacaagcctagcaacaccaaggtggacaagcgcgtgggtaccgaagtgaaaaccgactccaccgaccacgtgaagcccaaagagacagagaacaccaagcagcccagcaagagctgccacaagcccaaggccatcgtgcacaccgagaaagtgaacatgatgagcctgaccgtgctgggcttcagaatcctgctgctgaaagtggccggctttaacctgctgatgaccctgcggctgtggtccagccgcgccaagagaagcggatctggcgtgaagcagaccctgaatttcgacctgctgaagctggctggcgacgtggaatccaacccaggcccttctagagccaccatggactggatttggcgcatccttttccttgtcggcgctgctaccggcgcgcattccttcgaacaggttcagctccagcagtctggcgctgagcttgctagacctggcgcttctgtgaagctgagctgcaaggccagcggctacaccttcaccagctactggatgcagtgggtcaagcagaggccaggccaaggactggaatggatcggagccatctatcccggcgacggcgataccagatacacccagaagttcaagggcaaagccacactgaccgccgacaagagcagctccacagcctacatgcaactgagcagcctggcttccgaggacagcgccgtgtactattgtgccagaggcaaggtgtactacggcagcaaccctttcgcctattggggccagggaaccctggttacagtgtctgctacgcgtgccagcaccaagggacccagcgttttcccactggctccctgtagcagaagcaccagcgaatctacagccgctctgggctgcctggtcaaggactactttcctgagcctgtgaccgtgtcctggaacagcggagcactgacatctggcgtgcacacctttccagccgtgctgcaaagcagcggcctgtactctctgagcagcgtggtcacagtgccaagctctagcctgggcaccaagacctacacctgtaatgtggaccacaagcctagcaacaccaaggtggacaagcgcgtggaatctaagtacggatcccccatcaagaccgatgtgattacaatggaccccaaggacaactgctccaaggacgccaacgataccctgctgctccagctgaccaacaccagcgcctactacatgtacgagatcctgctgggcaaggccaccctgtacgccgtgctggtgtctgccctggtgctgatggctatggtcaagcggaaggacagccggggataa

SEQ ID NO: 8798 - DNA, 2766 bp, synthetic construct
  source 1..2766: mol_type = other DNA
atggccttaccagtgaccgccttgctcctgccgctggccttgctgctccacgccgccaggccggacatccagatgacccagagcagcagctacctgagcgtgtcccttggcggcagagtgaccatcacctgtaaagccagcgaccacatcaacaactggctggcctggtatcagcagaagcctggcaacgcccctagactgctgattagcggagccacctctctggaaacaggcgtgccaagcagattttccggcagcggctctggcaaggactacaccctgagcatcaccagcctccagaccgaggatgtggctacctactactgccagcagtattggagcaccccttggacctttggcggaggcaccaagctggaaatcaaactcgagacagtggccgccccatctgtattcatctttcctccatctgatgaacagcttaagtccggcactgcttctgttgtttgcctgcttaacaatttttacccgcgggaagccaaggtgcaatggaaagtggacaacgccctgcagtctggtaacagtcaggaaagcgtgactgaacaggacagcaaagactccacatactccttgagttccaccttgacgctcagtaaggcagactacgagaagcacaaggtttatgcctgtgaagtgactcaccagggcctctctagcccagtgactaagtccttcaaccgcggggagtgtaggaagcgacgggggtcaggcgccactaacttctctctgctgaaacaagccggggacgtggaggagaatccaggtcccactagtatggactggatttggcgcatccttttccttgtcggcgctgctaccggcgcgcattccttcgaagttcagctggttgaatctggcggcggactggttcaacctggcggatctctgagactgagctgtgccgcctctggctacgcctttagcagctactgggtcaactgggttcgacaggcccctggcaaaggactggaatgggtcgcccaaatctatcccggcgacggcgacaccaactacaacggcaagttcaagggcagattcaccatcagccgggacaacagcaagaacaccctgtacctccagatgaactccctgagagccgaggacaccgccgtgtactattgtgccagatccatcaccaccgtcgtgggctgcgctatggattattggggccagggaaccctggtcaccgtgtcctctacgcgtgcctctacaaagggaccctccgtgtttcctctggctccctgtagcagaagcaccagcgaatctacagccgctctgggctgcctggtcaaggactactttcctgagcctgtgaccgtgtcctggaacagcggagcactgacatctggcgtgcacacctttccagccgtgctccaaagcagcggcctgtactctctgagcagcgtggtcacagtgcctagctctagcctgggcaccaagacctacacctgtaatgtggaccacaagcctagcaacaccaaggtggacaagcgcgtggaatctaagtacggccctccttgtcctccatgtcctggtaccatccccgaggacacattcttcccaagccccgagagcagctgcgacgtgaagctggtggaaaagagcttcgagacagacaccaacctgaacttccagaacctgagcgtgatcggcttcagaatcctgctgctgaaagtggccggctttaacctgctgatgaccctgcggctgtggtccagccgcgccaagagaagcggatctggcgtgaagcagaccctgaatttcgacctgctgaagctggctggcgacgtggaatccaacccaggcccttctagagccaccatggactggatttggcgcatccttttccttgtcggcgctgctaccggcgcgcattccttcgaagttcagctggttgaatctggcggcggactggttcaacctggcggatctctgagactgagctgtgccgcctctggctacgcctttagcagctactgggtcaactgggttcgacaggcccctggcaaaggactggaatgggtcgcccaaatctatcccggcgacggcgacaccaactacaacggcaagttcaagggcagattcaccatcagccgggacaacagcaagaacaccctgtacctccagatgaactccctgagagccgaggacaccgccgtgtactattgtgccagatccatcaccaccgtcgtgggctgcgctatggattattggggccagggaaccctggtcaccgtgtcctctacgcgtgcttctacaaaaggcccttctgtgttcccactggcaccctgctccagaagcacatccgagtctactgctgccctgggctgtctcgtgaaggattatttccccgagccagtgacagtcagctggaacagcggagcactgacaagcggagtgcacacattccctgctgtcctgcagtcctctggcctgtacagcctgtctagcgtcgtgacagtgccaagcagctccctgggaacaaagacatacacatgcaatgtcgatcacaaaccctccaatacgaaagtggacaagagggtcgagagcaaatacggcccaccatgtccgccttgtccaggatccggcagagccgattgcggctttaccagcgagagctaccagcagggcgtgctgagcgccaccatcctgtacgagatcctgctgggcaaggccaccctgtacgccgtgctggtgtctgccctggtgctgatggctatggtcaagcggaaggacagccggggataa

SEQ ID NO: 8799 - DNA, 2772 bp, synthetic construct
  source 1..2772: mol_type = other DNA
atggccttaccagtgaccgccttgctcctgccgctggccttgctgctccacgccgccaggccggacatccagatgacccagagcagcagctacctgagcgtgtcccttggcggcagagtgaccatcacctgtaaagccagcgaccacatcaacaactggctggcctggtatcagcagaagcctggcaacgcccctagactgctgattagcggagccacctctctggaaacaggcgtgccaagcagattttccggcagcggctctggcaaggactacaccctgagcatcaccagcctccagaccgaggatgtggctacctactactgccagcagtattggagcaccccttggacctttggcggaggcaccaagctggaaatcaaactcgagacagtggccgccccatctgtattcatctttcctccatctgatgaacagcttaagtccggcactgcttctgttgtttgcctgcttaacaatttttacccgcgggaagccaaggtgcaatggaaagtggacaacgccctgcagtctggtaacagtcaggaaagcgtgactgaacaggacagcaaagactccacatactccttgagttccaccttgacgctcagtaaggcagactacgagaagcacaaggtttatgcctgtgaagtgactcaccagggcctctctagcccagtgactaagtccttcaaccgcggggagtgtaggaagcgacgggggtcaggcgccactaacttctctctgctgaaacaagccggggacgtggaggagaatccaggtcccactagtatggactggatttggcgcatccttttccttgtcggcgctgctaccggcgcgcattccttcgaacaagttcagcttcaacagcctggcgctgagctggtcaaacctggcgcttctgtgaagatgagctgcaaagccagcggctacgccttcagcagctactggatcaactggatgaagcagaaacccggccagggactcgaatggatcggccaaatctatcccggcgacggcgacaccaactacaacggcaagttcaagggcagagccacactgaccgccgatacctctagcagcacagcctacatgcagctgagcagcctgaccagcgaagatagcgccgtgtacttctgtgcccggtccatcacaacagtcgtgggctgcgctatggactattggggccagggaacaagcgtgaccgtgtctagtacgcgtgcctctacaaagggaccctccgtgtttcctctggctccctgtagcagaagcaccagcgaatctacagccgctctgggctgcctggtcaaggactactttcctgagcctgtgaccgtgtcctggaacagcggagcactgacatctggcgtgcacacctttccagccgtgctccaaagcagcggcctgtactctctgagcagcgtggtcacagtgcctagctctagcctgggcaccaagacctacacctgtaatgtggaccacaagcctagcaacaccaaggtggacaagcgcgtggaatctaagtacggccctccttgtcctccatgtcctggtaccatccccgaggacacattcttcccaagccccgagagcagctgcgacgtgaagctggtggaaaagagcttcgagacagacaccaacctgaacttccagaacctgagcgtgatcggcttcagaatcctgctgctgaaagtggccggctttaacctgctgatgaccctgcggctgtggtccagccgcgccaagagaagcggatctggcgtgaagcagaccctgaatttcgacctgctgaagctggctggcgacgtggaatccaacccaggcccttctagagccaccatggactggatttggcgcatccttttccttgtcggcgctgctaccggcgcgcattccttcgaacaagttcagcttcaacagcctggcgctgagctggtcaaacctggcgcttctgtgaagatgagctgcaaagccagcggctacgccttcagcagctactggatcaactggatgaagcagaaacccggccagggactcgaatggatcggccaaatctatcccggcgacggcgacaccaactacaacggcaagttcaagggcagagccacactgaccgccgatacctctagcagcacagcctacatgcagctgagcagcctgaccagcgaagatagcgccgtgtacttctgtgcccggtccatcacaacagtcgtgggctgcgctatggactattggggccagggaacaagcgtgaccgtgtctagtacgcgtgcttctacaaaaggcccttctgtgttcccactggcaccctgctccagaagcacatccgagtctactgctgccctgggctgtctcgtgaaggattatttccccgagccagtgacagtcagctggaacagcggagcactgacaagcggagtgcacacattccctgctgtcctgcagtcctctggcctgtacagcctgtctagcgtcgtgacagtgccaagcagctccctgggaacaaagacatacacatgcaatgtcgatcacaaaccctccaatacgaaagtggacaagagggtcgagagcaaatacggcccaccatgtccgccttgtccaggatccggcagagccgattgcggctttaccagcgagagctaccagcagggcgtgctgagcgccaccatcctgtacgagatcctgctgggcaaggccaccctgtacgccgtgctggtgtctgccctggtgctgatggctatggtcaagcggaaggacagccggggataa

SEQ ID NO: 8800 - DNA, 2784 bp, synthetic construct
  source 1..2784: mol_type = other DNA
atggccttaccagtgaccgccttgctcctgccgctggccttgctgctccacgccgccaggccggacatccagttgacccagtcccccagctcactcagcgccagtgtgggggaccgggtgaccattacctgtaaagccagtcagagtgtggactatgacggggatagcttcctgaattggtatcagcagaagcctggcaaagccccaaagctgctgatctacgctgcatctaatctggagtcaggcgtgccttccaggttctccggtagtgggtctgggaccgatttcacattgaccatttcatccctccaacccgaggatttcgctacatattactgtcagcagtccaatgaggaccctctcacctttggccagggcaccaaagttgaaattaagagactcgagacagtggccgccccatctgtattcatctttcctccatctgatgaacagcttaagtccggcactgcttctgttgtttgcctgcttaacaatttttacccgcgggaagccaaggtgcaatggaaagtggacaacgccctgcagtctggtaacagtcaggaaagcgtgactgaacaggacagcaaagactccacatactccttgagttccaccttgacgctcagtaaggcagactacgagaagcacaaggtttatgcctgtgaagtgactcaccagggcctctctagcccagtgactaagtccttcaaccgcggggagtgtaggaagcgacgggggtcaggcgccactaacttctctctgctgaaacaagccggggacgtggaggagaatccaggtcccactagtatggactggatttggcgcatccttttccttgtcggcgctgctaccggcgcgcattccttcgaagaagtccaacttgtggagtctggagggggcctggtgcagcccggcggctctctcagactgtcttgtgcggcaagcggctacaccttcacctcttactggatagaatgggtgaggcaggcacctggaaagggactggagtggattggagagattctgccaggagggggagatacaaattacaatgaaatcttcaaggggcgggccaccttttcagcggataccagcaagaatacagcttacctgcagatgaatagcctccgggcagaagataccgctgtttattattgcacgagacgggtgccaataagactggactattgggggcaagggactcttgtcaccgtcagttcaacgcgtgcctctacaaagggaccctccgtgtttcctctggctccctgtagcagaagcaccagcgaatctacagccgctctgggctgcctggtcaaggactactttcctgagcctgtgaccgtgtcctggaacagcggagcactgacatctggcgtgcacacctttccagccgtgctccaaagcagcggcctgtactctctgagcagcgtggtcacagtgcctagctctagcctgggcaccaagacctacacctgtaatgtggaccacaagcctagcaacaccaaggtggacaagcgcgtggaatctaagtacggccctccttgtcctccatgtcctggtaccatccccgaggacacattcttcccaagccccgagagcagctgcgacgtgaagctggtggaaaagagcttcgagacagacaccaacctgaacttccagaacctgagcgtgatcggcttcagaatcctgctgctgaaagtggccggctttaacctgctgatgaccctgcggctgtggtccagccgcgccaagagaagcggatctggcgtgaagcagaccctgaatttcgacctgctgaagctggctggcgacgtggaatccaacccaggcccttctagagccaccatggccctgcctgtgacagctctgctgctgcctctggcactgctgctgcacgccgccagacctgcatgcgaagtgcagctggtagaatcaggcggcgggctggtacaacctggcagatccctccggcttagttgcgcggcttctggattcacattcaatgattacgctatgcactgggtgcgacaagcaccaggtaagggacttgagtgggtaagtacaataagctggaactccggcagcatagggtatgctgacagtgtcaagggccggttcaccattagtcgggataatgctaaaaaatctctctaccttcagatgaatagtctccgagctgaagacactgctctgtattactgcgccaaagacatacagtacgggaattactactacggaatggacgtctggggacaggggaccacggtaactgttagctctgggcccgcttctacaaaaggcccttctgtgttcccactggcaccctgctccagaagcacatccgagtctactgctgccctgggctgtctcgtgaaggattatttccccgagccagtgacagtcagctggaacagcggagcactgacaagcggagtgcacacattccctgctgtcctgcagtcctctggcctgtacagcctgtctagcgtcgtgacagtgccaagcagctccctgggaacaaagacatacacatgcaatgtcgatcacaaaccctccaatacgaaagtggacaagagggtcgagagcaaatacggcccaccatgtccgccttgtccaggatccggcagagccgattgcggctttaccagcgagagctaccagcagggcgtgctgagcgccaccatcctgtacgagatcctgctgggcaaggccaccctgtacgccgtgctggtgtctgccctggtgctgatggctatggtcaagcggaaggacagccggggataa

SEQ ID NO: 8801 - DNA, 2823 bp, synthetic construct
  source 1..2823: mol_type = other DNA
atggccttaccagtgaccgccttgctcctgccgctggccttgctgctccacgccgccaggccggacatccagttgacccagtcccccagctcactcagcgccagtgtgggggaccgggtgaccattacctgtaaagccagtcagagtgtggactatgacggggatagcttcctgaattggtatcagcagaagcctggcaaagccccaaagctgctgatctacgctgcatctaatctggagtcaggcgtgccttccaggttctccggtagtgggtctgggaccgatttcacattgaccatttcatccctccaacccgaggatttcgctacatattactgtcagcagtccaatgaggaccctctcacctttggccagggcaccaaagttgaaattaagagactcgagacagtggccgccccatctgtattcatctttcctccatctgatgaacagcttaagtccggcactgcttctgttgtttgcctgcttaacaatttttacccgcgggaagccaaggtgcaatggaaagtggacaacgccctgcagtctggtaacagtcaggaaagcgtgactgaacaggacagcaaagactccacatactccttgagttccaccttgacgctcagtaaggcagactacgagaagcacaaggtttatgcctgtgaagtgactcaccagggcctctctagcccagtgactaagtccttcaaccgcggggagtgtaggaagcgacgggggtcaggcgccactaacttctctctgctgaaacaagccggggacgtggaggagaatccaggtcccactagtatggactggatttggcgcatccttttccttgtcggcgctgctaccggcgcgcattccttcgaagaagtccaacttgtggagtctggagggggcctggtgcagcccggcggctctctcagactgtcttgtgcggcaagcggctacaccttcacctcttactggatagaatgggtgaggcaggcacctggaaagggactggagtggattggagagattctgccaggagggggagatacaaattacaatgaaatcttcaaggggcgggccaccttttcagcggataccagcaagaatacagcttacctgcagatgaatagcctccgggcagaagataccgctgtttattattgcacgagacgggtgccaataagactggactattgggggcaagggactcttgtcaccgtcagttcaacgcgtgcctctacaaagggaccctccgtgtttcctctggctccctgtagcagaagcaccagcgaatctacagccgctctgggctgcctggtcaaggactactttcctgagcctgtgaccgtgtcctggaacagcggagcactgacatctggcgtgcacacctttccagccgtgctccaaagcagcggcctgtactctctgagcagcgtggtcacagtgcctagctctagcctgggcaccaagacctacacctgtaatgtggaccacaagcctagcaacaccaaggtggacaagcgcgtggaatctaagtacggccctccttgtcctccatgtcctggtaccatccccgaggacacattcttcccaagccccgagagcagctgcgacgtgaagctggtggaaaagagcttcgagacagacaccaacctgaacttccagaacctgagcgtgatcggcttcagaatcctgctgctgaaagtggccggctttaacctgctgatgaccctgcggctgtggtccagccgcgccaagagaagcggatctggcgtgaagcagaccctgaatttcgacctgctgaagctggctggcgacgtggaatccaacccaggcccttctagagccaccatggccctgcctgtgacagctctgctgctgcctctggcactgctgctgcacgccgccagacctgcatgcgaagtgcagctggtagaatcaggcggcgggctggtacaacctggcagatccctccggcttagttgcgcggcttctggattcacattcaatgattacgctatgcactgggtgcgacaagcaccaggtaagggacttgagtgggtaagtacaataagctggaactccggcagcatagggtatgctgacagtgtcaagggccggttcaccattagtcgggataatgctaaaaaatctctctaccttcagatgaatagtctccgagctgaagacactgctctgtattactgcgccaaagacatacagtacgggaattactactacggaatggacgtctggggacaggggaccacggtaactgttagctctgggcccgcttctacaaaaggcccttctgtgttcccactggcaccctgctccagaagcacatccgagtctactgctgccctgggctgtctcgtgaaggattatttccccgagccagtgacagtcagctggaacagcggagcactgacaagcggagtgcacacattccctgctgtcctgcagtcctctggcctgtacagcctgtctagcgtcgtgacagtgccaagcagctccctgggaacaaagacatacacatgcaatgtcgatcacaaaccctccaatacgaaagtggacaagagggtcgagagcaaatacggcccaccatgtccgccttgtccaggatcccccatcaagaccgatgtgattacaatggaccccaaggacaactgctccaaggacgccaacgataccctgctgctccagctgaccaacaccagcgccaccatcctgtacgagatcctgctgggcaaggccaccctgtacgccgtgctggtgtctgccctggtgctgatggctatggtcaagcggaaggacagccggggataa

SEQ ID NO: 8802 - DNA, 3246 bp, synthetic construct
  source 1..3246: mol_type = other DNA
atggccttaccagtgaccgccttgctcctgccgctggccttgctgctccacgccgccaggccggacatccagttgacccagtcccccagctcactcagcgccagtgtgggggaccgggtgaccattacctgtaaagccagtcagagtgtggactatgacggggatagcttcctgaattggtatcagcagaagcctggcaaagccccaaagctgctgatctacgctgcatctaatctggagtcaggcgtgccttccaggttctccggtagtgggtctgggaccgatttcacattgaccatttcatccctccaacccgaggatttcgctacatattactgtcagcagtccaatgaggaccctctcacctttggccagggcaccaaagttgaaattaagagactcgagacagtggccgccccatctgtattcatctttcctccatctgatgaacagcttaagtccggcactgcttctgttgtttgcctgcttaacaatttttacccgcgggaagccaaggtgcaatggaaagtggacaacgccctgcagtctggtaacagtcaggaaagcgtgactgaacaggacagcaaagactccacatactccttgagttccaccttgacgctcagtaaggcagactacgagaagcacaaggtttatgcctgtgaagtgactcaccagggcctctctagcccagtgactaagtccttcaaccgcggggagtgtaggaagcgacgggggtcaggcgccactaacttctctctgctgaaacaagccggggacgtggaggagaatccaggtcccactagtatggactggatttggcgcatccttttccttgtcggcgctgctaccggcgcgcattccttcgaagaagtccaacttgtggagtctggagggggcctggtgcagcccggcggctctctcagactgtcttgtgcggcaagcggctacaccttcacctcttactggatagaatgggtgaggcaggcacctggaaagggactggagtggattggagagattctgccaggagggggagatacaaattacaatgaaatcttcaaggggcgggccaccttttcagcggataccagcaagaatacagcttacctgcagatgaatagcctccgggcagaagataccgctgtttattattgcacgagacgggtgccaataagactggactattgggggcaagggactcttgtcaccgtcagttcaacgcgtgcctctacaaagggaccctccgtgtttcctctggctccctgtagcagaagcaccagcgaatctacagccgctctgggctgcctggtcaaggactactttcctgagcctgtgaccgtgtcctggaacagcggagcactgacatctggcgtgcacacctttccagccgtgctccaaagcagcggcctgtactctctgagcagcgtggtcacagtgcctagctctagcctgggcaccaagacctacacctgtaatgtggaccacaagcctagcaacaccaaggtggacaagcgcgtgggtacccagagttttgggttgttggaccctaaattgtgctatctgttggacggaatcctgttcatttacggagtgatcctgaccgcattgttcctgcgggttaagttttccagatccgcagacgcacccgcttaccaacaagggcagaaccaactctacaatgaacttaatttggggcggagggaagagtacgacgttctggacaaaaggaggggacgagatcccgagatgggcggaaagcctcgaaggaagaatccgcaagaggggctttataacgaactccagaaagataaaatggcagaagcctatagtgagattgggatgaagggagaaaggaggaggggtaaaggtcacgatgggttgtaccaaggattgagcacagccactaaagatacctatgatgcgctccacatgcaggccctgccgccaagacgcgccaagagaagcggatctggcgtgaagcagaccctgaatttcgacctgctgaagctggctggcgacgtggaatccaacccaggcccttctagagccaccatggccctgcctgtgacagctctgctgctgcctctggcactgctgctgcacgccgccagacctttcgaggtgcagctggtggaatctggcggcggacttgttcaacctggcggctctctgagactgagctgtgccgcttctggctacaccttcagcagctactggatcgagtgggtccgacaggcccctggcaaaggactggaatggatcggagagatccttcctggcggaggcgacaccaactacaacgagattttcaagggcagagccaccttctccgccgacacctctaagaacacagcctacctgcagatgaacagcctgagagccgaggacaccgccgtgtactactgcaccagaagagtgcccatccggctggattattggggccagggaacactggtcaccgtgtctagcacgcgtgccagcaccaagggacccagcgttttcccactggctccctgtagcagaagcaccagcgaatctacagccgctctgggctgcctggtcaaggactactttcctgagcctgtgaccgtgtcctggaacagcggagcactgacatctggcgtgcacacctttccagccgtgctgcaaagcagcggcctgtactctctgagcagcgtggtcacagtgccaagctctagcctgggcaccaagacctacacctgtaatgtggaccacaagcctagcaacaccaaggtggacaagcgcgtggaatctaagtacggacctcctgcacctccagcacctggatcccagagcttcggcctgctggaccccaagctgtgctacctgctggatggcatcctgttcatctacggcgtgatcctgaccgccctgttcctgagagtgaagttcagcagaagcgccgacgcccctgcctaccagcagggacagaaccaactgtacaacgagctgaacctgggcagacgggaagagtacgacgtgctggacaagcggagaggcagggaccctgggctttccgcccatctccagcggagaaagaacccccaggaaggactgtataacgaactccagaaagacaagatggccgaagcctacagcgagatcggcatgaagggcgagcggagaagaggcaagggccacgatggcctgtaccagggcctgagcaccgccaccaaggacacctatgacgccctgcacatgcaggccctgcctccaagataa

SEQ ID NO: 8803 - DNA, 3027 bp, synthetic construct
  source 1..3027: mol_type = other DNA
atggccttaccagtgaccgccttgctcctgccgctggccttgctgctccacgccgccaggccggacatccagttgacccagtcccccagctcactcagcgccagtgtgggggaccgggtgaccattacctgtaaagccagtcagagtgtggactatgacggggatagcttcctgaattggtatcagcagaagcctggcaaagccccaaagctgctgatctacgctgcatctaatctggagtcaggcgtgccttccaggttctccggtagtgggtctgggaccgatttcacattgaccatttcatccctccaacccgaggatttcgctacatattactgtcagcagtccaatgaggaccctctcacctttggccagggcaccaaagttgaaattaagagactcgagacagtggccgccccatctgtattcatctttcctccatctgatgaacagcttaagtccggcactgcttctgttgtttgcctgcttaacaatttttacccgcgggaagccaaggtgcaatggaaagtggacaacgccctgcagtctggtaacagtcaggaaagcgtgactgaacaggacagcaaagactccacatactccttgagttccaccttgacgctcagtaaggcagactacgagaagcacaaggtttatgcctgtgaagtgactcaccagggcctctctagcccagtgactaagtccttcaaccgcggggagtgtaggaagcgacgggggtcaggcgccactaacttctctctgctgaaacaagccggggacgtggaggagaatccaggtcccactagtatggactggatttggcgcatccttttccttgtcggcgctgctaccggcgcgcattccttcgaagaagtccaacttgtggagtctggagggggcctggtgcagcccggcggctctctcagactgtcttgtgcggcaagcggctacaccttcacctcttactggatagaatgggtgaggcaggcacctggaaagggactggagtggattggagagattctgccaggagggggagatacaaattacaatgaaatcttcaaggggcgggccaccttttcagcggataccagcaagaatacagcttacctgcagatgaatagcctccgggcagaagataccgctgtttattattgcacgagacgggtgccaataagactggactattgggggcaagggactcttgtcaccgtcagttcaacgcgtgcctctacaaagggaccctccgtgtttcctctggctccctgtagcagaagcaccagcgaatctacagccgctctgggctgcctggtcaaggactactttcctgagcctgtgaccgtgtcctggaacagcggagcactgacatctggcgtgcacacctttccagccgtgctccaaagcagcggcctgtactctctgagcagcgtggtcacagtgcctagctctagcctgggcaccaagacctacacctgtaatgtggaccacaagcctagcaacaccaaggtggacaagcgcgtggaatctaagtacggccctccttgtcctccatgtcctggtacccagagttttgggttgttggaccctaaattgtgctatctgttggacggaatcctgttcatttacggagtgatcctgaccgcattgttcctgcgggttaagttttccagatccgcagacgcacccgcttaccaacaagggcagaaccaactctacaatgaacttaatttggggcggagggaagagtacgacgttctggacaaaaggaggggacgagatcccgagatgggcggaaagcctcgaaggaagaatccgcaagaggggctttataacgaactccagaaagataaaatggcagaagcctatagtgagattgggatgaagggagaaaggaggaggggtaaaggtcacgatgggttgtaccaaggattgagcacagccactaaagatacctatgatgcgctccacatgcaggccctgccgccaagacgcgccaagagaagcggatctggcgtgaagcagaccctgaatttcgacctgctgaagctggctggcgacgtggaatccaacccaggcccttctagagccaccatggccctgcctgtgacagctctgctgctgcctctggcactgctgctgcacgccgccagacctttcgaggtgcagctggtggaatctggcggcggacttgttcaacctggcggctctctgagactgagctgtgccgcttctggctacaccttcagcagctactggatcgagtgggtccgacaggcccctggcaaaggactggaatggatcggagagatccttcctggcggaggcgacaccaactacaacgagattttcaagggcagagccaccttctccgccgacacctctaagaacacagcctacctgcagatgaacagcctgagagccgaggacaccgccgtgtactactgcaccagaagagtgcccatccggctggattattggggccagggaacactggtcaccgtgtctagcacgcgtgccagcaccaagggacccagcgttttcccactggctccctgtagcagaagcaccagcgaatctacagccgctctgggctgcctggtcaaggactactttcctgagcctgtgaccgtgtcctggaacagcggagcactgacatctggcgtgcacacctttccagccgtgctgcaaagcagcggcctgtactctctgagcagcgtggtcacagtgccaagctctagcctgggcaccaagacctacacctgtaatgtggaccacaagcctagcaacaccaaggtggacaagcgcgtggaatctaagtacggatcccccatcaagaccgatgtgattacaatggaccccaaggacaactgctccaaggacgccaacgataccctgctgctccagctgaccaacaccagcgccaccatcctgtacgagatcctgctgggcaaggccaccctgtacgccgtgctggtgtctgccctggtgctgatggctatggtcaagcggaaggacagccggggataa

SEQ ID NO: 8804 - DNA, 1473 bp, synthetic construct
  source 1..1473: mol_type = other DNA
atggccttaccagtgaccgccttgctcctgccgctggccttgctgctccacgccgccaggccggacatccagatgacacagagccctagcagcctgtctgccagcgtgggagacagagtgaccatcacatgcaaggccagcgaccacatcaacaactggctggcctggtatcagcagaagcctggcaaggcccctaagctgctgatctacggcgctaccacactggaaacaggcgtgcccagcagattttctggcagcggctctggcaccgacttcaccctgacaatatccagcctccagcctgaggacttcgccacctactactgtcagcagagctggaacaccccttggacattcggccagggcaccaaggtggaaatcaagagaggtggcggaggatctggcggaggtggaagcggcggaggcggatctgaagttcagctggttgaatctggcggcggactggttcaacctggcggatctctgagactgagctgtgccgcctctggctacgcctttagcagctactgggtcaactgggttcgacaggcccctggcaaaggactggaatgggtcgcccaaatctatcccggcgacggcgacaccaactacaacggcaagttcaagggcagattcaccatcagccgggacaacagcaagaacaccctgtacctccagatgaactccctgagagccgaggacaccgccgtgtactattgtgccagatccatcaccaccgtcgtgggctgcgctatggattattggggccagggaaccctggtcaccgtgtcctctacgcgtaccacgacgccagcgccgcgaccaccaacaccggcgcccaccatcgcgtcgcagcccctgtccctgcgcccagaggcgtgccggccagcggcggggggcgcagtgcacacgagggggctggacttcgcctgtgacatctacatctgggcgcccttggccgggacttgtggggtccttctcctgtcactggttatcaccctttactgcaaacggggcagaaagaaactcctgtatatattcaaacaaccatttatgagaccagtacaaactactcaagaggaagatggctgtagctgccgatttccagaagaagaagaaggaggatgtgaactgagagtgaagttcagcaggagcgcagacgcccccgcgtaccagcagggccagaaccagctctataacgagctgaatctaggacgaagagaggagtacgatgttttggacaagagacgtggccgggaccctgagatggggggaaagccgagaaggaagaaccctcaggaaggcctgtacaatgaactgcagaaagataagatggcggaggcctacagtgagattgggatgaaaggcgagcgccggaggggcaaggggcacgatggcctttaccagggtctcagtacagccaccaaggacacctacgacgcccttcacatgcaggccctgccccctcgctaa

SEQ ID NO: 8805 - DNA, 1566 bp, synthetic construct
  source 1..1566: mol_type = other DNA
atggccttaccagtgaccgccttgctcctgccgctggccttgctgctccacgccgccaggccggctagaagcgaagatcggtatcggaaccccaaggaattccaggttcagctccagcagtctggacctggcctggtcaagcctagccagacactgtctctgacctgtgccatcagcggcgatagcgtgtcctctaatagagccgcctggaactggatcagacagagccctagcagaggactccagtggctgggcagaacctactaccgcagcaagtggtacaacgactacgccgtgtctctgcggagccggatcaccatcaatcccgtgaccagcaagaaccaggtggccctgcacatgaacagcgtgacccctgaagataccgccgtgtactactgtgccagagccggaattgtggtggtgcccggacctgagacattctactactacgaccacggcctggacgtgtggggccagggaacaacagtgactgtctcttctctcgagggagcaagaagtgaagatcgctacaggaaccctaaggggtcagccggctctttcgaagacatccagatgacacagagcccctctagcctgtctgccagcgtgggagacagagtgaccatcacctgtagagccagccagagcatcagaaactacctgaactggtatcagcaaaagcccggcaaggcccctgagctgctgattcatgctgcaagcagcctccagagcggcgtgccaagcagattttctggcagcggcagcggaaccgacttcaccctgacaatatctagcctccagcctgaggacttcgccagctactactgccagcagagctacagcgcccctcctatcacctttggacagggcaccagactggaaatcaagacgcgtaccacgacgccagcgccgcgaccaccaacaccggcgcccaccatcgcgtcgcagcccctgtccctgcgcccagaggcgtgccggccagcggcggggggcgcagtgcacacgagggggctggacttcgcctgtgacatctacatctgggcgcccttggccgggacttgtggggtccttctcctgtcactggttatcaccctttactgcaaacggggcagaaagaaactcctgtatatattcaaacaaccatttatgagaccagtacaaactactcaagaggaagatggctgtagctgccgatttccagaagaagaagaaggaggatgtgaactgagagtgaagttcagcaggagcgcagacgcccccgcgtaccagcagggccagaaccagctctataacgagctgaatctaggacgaagagaggagtacgatgttttggacaagagacgtggccgggaccctgagatggggggaaagccgagaaggaagaaccctcaggaaggcctgtacaatgaactgcagaaagataagatggcggaggcctacagtgagattgggatgaaaggcgagcgccggaggggcaaggggcacgatggcctttaccagggtctcagtacagccaccaaggacacctacgacgcccttcacatgcaggccctgccccctcgctga

SEQ ID NO: 8806 - DNA, 1572 bp, synthetic construct
  source 1..1572: mol_type = other DNA
atggccttaccagtgaccgccttgctcctgccgctggccttgctgctccacgccgccaggccggcatgcgctagaagcgaagatcggtatcggaaccccaagggtacccaggttcagctccagcagtctggacctggcctggtcaagcctagccagacactgtctctgacctgtgccatcagcggcgatagcgtgtcctctaatagagccgcctggaactggatcagacagagccctagcagaggactccagtggctgggcagaacctactaccgcagcaagtggtacaacgactacgccgtgtctctgcggagccggatcaccatcaatcccgtgaccagcaagaaccaggtggccctgcacatgaacagcgtgacccctgaagataccgccgtgtactactgtgccagagccggaattgtggtggtgcccggacctgagacattctactactacgaccacggcctggacgtgtggggccagggaacaacagtgactgtctcttctctcgagggagcaagaagtgaagatcgctacaggaaccctaaggggtcagccggctctttcgaagacatccagatgacacagagcccctctagcctgtctgccagcgtgggagacagagtgaccatcacctgtagagccagccagagcatcagaaactacctgaactggtatcagcaaaagcccggcaaggcccctgagctgctgattcatgctgcaagcagcctccagagcggcgtgccaagcagattttctggcagcggcagcggaaccgacttcaccctgacaatatctagcctccagcctgaggacttcgccagctactactgccagcaaagctacagcgcccctcctatcacctttggacagggcaccagactggaaatcaagacgcgtaccacgacgccagcgccgcgaccaccaacaccggcgcccaccatcgcgtcgcagcccctgtccctgcgcccagaggcgtgccggccagcggcggggggcgcagtgcacacgagggggctggacttcgcctgtgacatctacatctgggcgcccttggccgggacttgtggggtccttctcctgtcactggttatcaccctttactgcaaacggggcagaaagaaactcctgtatatattcaaacaaccatttatgagaccagtacaaactactcaagaggaagatggctgtagctgccgatttccagaagaagaagaaggaggatgtgaactgagagtgaagttcagcaggagcgcagacgcccccgcgtaccagcagggccagaaccagctctataacgagctgaatctaggacgaagagaggagtacgatgttttggacaagagacgtggccgggaccctgagatggggggaaagccgagaaggaagaaccctcaggaaggcctgtacaatgaactgcagaaagataagatggcggaggcctacagtgagattgggatgaaaggcgagcgccggaggggcaaggggcacgatggcctttaccagggtctcagtacagccaccaaggacacctacgacgcccttcacatgcaggccctgccccctcgctga

SEQ ID NO: 8807 - DNA, 1566 bp, synthetic construct
  source 1..1566: mol_type = other DNA
atggccttaccagtgaccgccttgctcctgccgctggccttgctgctccacgccgccaggccggctagaagcgaagatcggtatcggaaccccaaggaattccaggttcagctccagcagtctggacctggcctggtcaagcctagccagacactgtctctgacctgtgccatcagcggcgatagcgtgtcctctaatagagccgcctggaactggatcagacagagccctagcagaggactccagtggctgggcagaacctactaccgcagcaagtggtacaacgactacgccgtgtctctgcggagccggatcaccatcaatcccgtgaccagcaagaaccaggtggccctgcacatgaacagcgtgacccctgaagataccgccgtgtactactgtgccagagccggaattgtggtggtgcccggacctgagacattctactactacgaccacggcctggacgtgtggggccagggaacaacagtgactgtctcttctctcgagggaggctctgccagaagcgaggacagatacagaaaccccaaaggcggaagcttcgaagacatccagatgacacagagcccctctagcctgtctgccagcgtgggagacagagtgaccatcacctgtagagccagccagagcatcagaaactacctgaactggtatcagcaaaagcccggcaaggcccctgagctgctgattcatgctgcaagcagcctccagagcggcgtgccaagcagattttctggcagcggcagcggaaccgacttcaccctgacaatatctagcctccagcctgaggacttcgccagctactactgccagcagagctacagcgcccctcctatcacctttggacagggcaccagactggaaatcaagacgcgtaccacgacgccagcgccgcgaccaccaacaccggcgcccaccatcgcgtcgcagcccctgtccctgcgcccagaggcgtgccggccagcggcggggggcgcagtgcacacgagggggctggacttcgcctgtgacatctacatctgggcgcccttggccgggacttgtggggtccttctcctgtcactggttatcaccctttactgcaaacggggcagaaagaaactcctgtatatattcaaacaaccatttatgagaccagtacaaactactcaagaggaagatggctgtagctgccgatttccagaagaagaagaaggaggatgtgaactgagagtgaagttcagcaggagcgcagacgcccccgcgtaccagcagggccagaaccagctctataacgagctgaatctaggacgaagagaggagtacgatgttttggacaagagacgtggccgggaccctgagatggggggaaagccgagaaggaagaaccctcaggaaggcctgtacaatgaactgcagaaagataagatggcggaggcctacagtgagattgggatgaaaggcgagcgccggaggggcaaggggcacgatggcctttaccagggtctcagtacagccaccaaggacacctacgacgcccttcacatgcaggccctgccccctcgctga

SEQ ID NO: 8808 - DNA, 1572 bp, synthetic construct
  source 1..1572: mol_type = other DNA
atggccttaccagtgaccgccttgctcctgccgctggccttgctgctccacgccgccaggccggcatgcgctagaagcgaagatcggtatcggaaccccaagggtacccaggttcagctccagcagtctggacctggcctggtcaagcctagccagacactgtctctgacctgtgccatcagcggcgatagcgtgtcctctaatagagccgcctggaactggatcagacagagccctagcagaggactccagtggctgggcagaacctactaccgcagcaagtggtacaacgactacgccgtgtctctgcggagccggatcaccatcaatcccgtgaccagcaagaaccaggtggccctgcacatgaacagcgtgacccctgaagataccgccgtgtactactgtgccagagccggaattgtggtggtgcccggacctgagacattctactactacgaccacggcctggacgtgtggggccagggaacaacagtgactgtctcttctctcgagggaggctctgccagaagcgaggacagatacagaaaccccaaaggcggaagcttcgaagacatccagatgacacagagcccctctagcctgtctgccagcgtgggagacagagtgaccatcacctgtagagccagccagagcatcagaaactacctgaactggtatcagcaaaagcccggcaaggcccctgagctgctgattcatgctgcaagcagcctccagagcggcgtgccaagcagattttctggcagcggcagcggaaccgacttcaccctgacaatatctagcctccagcctgaggacttcgccagctactactgccagcagagctacagcgcccctcctatcacctttggacagggcaccagactggaaatcaagacgcgtaccacgacgccagcgccgcgaccaccaacaccggcgcccaccatcgcgtcgcagcccctgtccctgcgcccagaggcgtgccggccagcggcggggggcgcagtgcacacgagggggctggacttcgcctgtgacatctacatctgggcgcccttggccgggacttgtggggtccttctcctgtcactggttatcaccctttactgcaaacggggcagaaagaaactcctgtatatattcaaacaaccatttatgagaccagtacaaactactcaagaggaagatggctgtagctgccgatttccagaagaagaagaaggaggatgtgaactgagagtgaagttcagcaggagcgcagacgcccccgcgtaccagcagggccagaaccagctctataacgagctgaatctaggacgaagagaggagtacgatgttttggacaagagacgtggccgggaccctgagatggggggaaagccgagaaggaagaaccctcaggaaggcctgtacaatgaactgcagaaagataagatggcggaggcctacagtgagattgggatgaaaggcgagcgccggaggggcaaggggcacgatggcctttaccagggtctcagtacagccaccaaggacacctacgacgcccttcacatgcaggccctgccccctcgctga

SEQ ID NO: 8809 - DNA, 1527 bp, synthetic construct; identical to SEQ ID NO: 5057
  source 1..1527: mol_type = other DNA

SEQ ID NO: 8810 - DNA, 1764 bp, synthetic construct
  source 1..1764: mol_type = other DNA
atggccttaccagtgaccgccttgctcctgccgctggccttgctgctccacgccgccaggccggaagtgcaactgctggaatccggtggcggcctggtgcaagcaggcggatctctcagacttagctgtgccgcctccggcagaaccttcacaatgggatggtttaggcaggctccagggaaagagagagagttcgtcgccgccatctctctgtctcccacactggcctactacgccgactctgtgaaaggccggttcaccatctccagagataatgccaagaacaccgtggtgctgcaaatgaactctctgaaacccgaggatacagccctgtactattgtgccgctgaccggaagtccgtgatgagcatcagacccgattactggggacagggcacactggtcacagtgtctagtacgcgtaccacgacgccagcgccgcgaccaccaacaccggcgcccaccatcgcgtcgcagcccctgtccctgcgcccagaggcgtgccggccagcggcggggggcgcagtgcacacgagggggctggacttcgcctgtgacatctacatctgggcgcccttggccgggacttgtggggtccttctcctgtcactggttatcaccctttactgcaaacggggcagaaagaaactcctgtatatattcaaacaaccatttatgagaccagtacaaactactcaagaggaagatggctgtagctgccgatttccagaagaagaagaaggaggatgtgaactgagagtgaagttcagcaggagcgcagacgcccccgcgtaccagcagggccagaaccagctctataacgagctgaatctaggacgaagagaggagtacgatgttttggacaagagacgtggccgggaccctgagatggggggaaagccgagaaggaagaaccctcaggaaggcctgtacaatgaactgcagaaagataagatggcggaggcctacagtgagattgggatgaaaggcgagcgccggaggggcaaggggcacgatggcctttaccagggtctcagtacagccaccaaggacacctacgacgcccttcacatgcaggccctgccccctcgctctagtggctccggcgagggcagaggaagtctactaacctgcggagatgtggaagaaaatcctggcccacatatgaccgagtacaagcccacggtgcgcctcgccacccgcgacgacgtccccagggccgtacgcaccctcgccgccgcgttcgccgactaccccgccacgcgccacaccgtcgatccggaccgccacatcgagcgggtcaccgagctgcaagaactcttcctcacgcgcgtcgggctcgacatcggcaaggtgtgggtcgcggacgacggcgccgcggtggcggtctggaccacgccggagagcgtcgaagcgggggcggtgttcgccgagatcggcccgcgcatggccgagttgagcggttcccggctggccgcgcagcaacagatggaaggcctcctggcgccgcaccggcccaaggagcccgcgtggttcctggccaccgtcggcgtctcgcccgaccaccagggcaagggtctgggcagcgccgtcgtgctccccggagtggaggcggccgagcgcgccggggtgcccgccttcctggagacctccgcgccccgcaacctccccttctacgagcggctcggcttcaccgtcaccgccgacgtcgaggtgcccgaaggaccgcgcacctggtgcatgacccgcaagcccggtgcctga

SEQ ID NO: 8811 - DNA, 1764 bp, synthetic construct
  source 1..1764: mol_type = other DNA
atggccttaccagtgaccgccttgctcctgccgctggccttgctgctccacgccgccaggccggaagtgcaactgctggaatccggtggcggcctggtgcaagcaggcggatctctcagacttagctgtgccgcctccggcagaaccttcacaatgggatggtttaggcaggctccagggaaagagagagagttcgtcgccgccatctctctgtctcccacactggcctactacgccgactctgtgaaaggccggttcaccatctccagagataatgccaagaacaccgtggtgctgcaaatgaactctctgaaacccgaggatacagccctgtactattgtgccgctgaccggaagtccgtgatgagcatcagacccgattactggggacagggcacacaagtcacagtgtcctctacgcgtaccacgacgccagcgccgcgaccaccaacaccggcgcccaccatcgcgtcgcagcccctgtccctgcgcccagaggcgtgccggccagcggcggggggcgcagtgcacacgagggggctggacttcgcctgtgacatctacatctgggcgcccttggccgggacttgtggggtccttctcctgtcactggttatcaccctttactgcaaacggggcagaaagaaactcctgtatatattcaaacaaccatttatgagaccagtacaaactactcaagaggaagatggctgtagctgccgatttccagaagaagaagaaggaggatgtgaactgagagtgaagttcagcaggagcgcagacgcccccgcgtaccagcagggccagaaccagctctataacgagctgaatctaggacgaagagaggagtacgatgttttggacaagagacgtggccgggaccctgagatggggggaaagccgagaaggaagaaccctcaggaaggcctgtacaatgaactgcagaaagataagatggcggaggcctacagtgagattgggatgaaaggcgagcgccggaggggcaaggggcacgatggcctttaccagggtctcagtacagccaccaaggacacctacgacgcccttcacatgcaggccctgccccctcgctctagtggctccggcgagggcagaggaagtctactaacctgcggagatgtggaagaaaatcctggcccacatatgaccgagtacaagcccacggtgcgcctcgccacccgcgacgacgtccccagggccgtacgcaccctcgccgccgcgttcgccgactaccccgccacgcgccacaccgtcgatccggaccgccacatcgagcgggtcaccgagctgcaagaactcttcctcacgcgcgtcgggctcgacatcggcaaggtgtgggtcgcggacgacggcgccgcggtggcggtctggaccacgccggagagcgtcgaagcgggggcggtgttcgccgagatcggcccgcgcatggccgagttgagcggttcccggctggccgcgcagcaacagatggaaggcctcctggcgccgcaccggcccaaggagcccgcgtggttcctggccaccgtcggcgtctcgcccgaccaccagggcaagggtctgggcagcgccgtcgtgctccccggagtggaggcggccgagcgcgccggggtgcccgccttcctggagacctccgcgccccgcaacctccccttctacgagcggctcggcttcaccgtcaccgccgacgtcgaggtgcccgaaggaccgcgcacctggtgcatgacccgcaagcccggtgcctga

SEQ ID NO: 8812 - DNA, 1764 bp, synthetic construct
  source 1..1764: mol_type = other DNA
atggccttaccagtgaccgccttgctcctgccgctggccttgctgctccacgccgccaggccgcaagtgcaactggttgaatccggtggcggcctggtgcaagcaggcggatctctcagacttagctgtgccgcctccggcagaaccttcacaatgggatggtttaggcaggctccagggaaagagagagagttcgtcgccgccatctctctgtctcccacactggcctactacgccgactctgtgaaaggccggttcaccatctccagagataatgccaagaacaccgtggtgctgcaaatgaactctctgaaacccgaggatacagccctgtactattgtgccgctgaccggaagtccgtgatgagcatcagacccgattactggggacagggcacacaagtcacagtgtcctctacgcgtaccacgacgccagcgccgcgaccaccaacaccggcgcccaccatcgcgtcgcagcccctgtccctgcgcccagaggcgtgccggccagcggcggggggcgcagtgcacacgagggggctggacttcgcctgtgacatctacatctgggcgcccttggccgggacttgtggggtccttctcctgtcactggttatcaccctttactgcaaacggggcagaaagaaactcctgtatatattcaaacaaccatttatgagaccagtacaaactactcaagaggaagatggctgtagctgccgatttccagaagaagaagaaggaggatgtgaactgagagtgaagttcagcaggagcgcagacgcccccgcgtaccagcagggccagaaccagctctataacgagctgaatctaggacgaagagaggagtacgatgttttggacaagagacgtggccgggaccctgagatggggggaaagccgagaaggaagaaccctcaggaaggcctgtacaatgaactgcagaaagataagatggcggaggcctacagtgagattgggatgaaaggcgagcgccggaggggcaaggggcacgatggcctttaccagggtctcagtacagccaccaaggacacctacgacgcccttcacatgcaggccctgccccctcgctctagtggctccggcgagggcagaggaagtctactaacctgcggagatgtggaagaaaatcctggcccacatatgaccgagtacaagcccacggtgcgcctcgccacccgcgacgacgtccccagggccgtacgcaccctcgccgccgcgttcgccgactaccccgccacgcgccacaccgtcgatccggaccgccacatcgagcgggtcaccgagctgcaagaactcttcctcacgcgcgtcgggctcgacatcggcaaggtgtgggtcgcggacgacggcgccgcggtggcggtctggaccacgccggagagcgtcgaagcgggggcggtgttcgccgagatcggcccgcgcatggccgagttgagcggttcccggctggccgcgcagcaacagatggaaggcctcctggcgccgcaccggcccaaggagcccgcgtggttcctggccaccgtcggcgtctcgcccgaccaccagggcaagggtctgggcagcgccgtcgtgctccccggagtggaggcggccgagcgcgccggggtgcccgccttcctggagacctccgcgccccgcaacctccccttctacgagcggctcggcttcaccgtcaccgccgacgtcgaggtgcccgaaggaccgcgcacctggtgcatgacccgcaagcccggtgcctga

SEQ ID NO: 8813 - DNA, 1764 bp, synthetic construct
  source 1..1764: mol_type = other DNA
atggccttaccagtgaccgccttgctcctgccgctggccttgctgctccacgccgccaggccggaagtgcaactgctggaatccggtggcggcctggtgcaagcaggcggatctctcagacttagctgtgccgcctccggcagaaccttcacaatgggatggtttaggcaggctccagggaaagagagagagttcgtcgccgccatctctctgtctcccacactggcctactacgccagctctgtgagaggccggttcaccatctccagagataatgccaagaacaccgtggtgctgcaaatgaactctctgaaacccgaggatacagccctgtactattgtgccgctgaccggaagtccgtgatgagcatcagacccgattactggggacagggcacacaagtcacagtgtcctctacgcgtaccacgacgccagcgccgcgaccaccaacaccggcgcccaccatcgcgtcgcagcccctgtccctgcgcccagaggcgtgccggccagcggcggggggcgcagtgcacacgagggggctggacttcgcctgtgacatctacatctgggcgcccttggccgggacttgtggggtccttctcctgtcactggttatcaccctttactgcaaacggggcagaaagaaactcctgtatatattcaaacaaccatttatgagaccagtacaaactactcaagaggaagatggctgtagctgccgatttccagaagaagaagaaggaggatgtgaactgagagtgaagttcagcaggagcgcagacgcccccgcgtaccagcagggccagaaccagctctataacgagctgaatctaggacgaagagaggagtacgatgttttggacaagagacgtggccgggaccctgagatggggggaaagccgagaaggaagaaccctcaggaaggcctgtacaatgaactgcagaaagataagatggcggaggcctacagtgagattgggatgaaaggcgagcgccggaggggcaaggggcacgatggcctttaccagggtctcagtacagccaccaaggacacctacgacgcccttcacatgcaggccctgccccctcgctctagtggctccggcgagggcagaggaagtctactaacctgcggagatgtggaagaaaatcctggcccacatatgaccgagtacaagcccacggtgcgcctcgccacccgcgacgacgtccccagggccgtacgcaccctcgccgccgcgttcgccgactaccccgccacgcgccacaccgtcgatccggaccgccacatcgagcgggtcaccgagctgcaagaactcttcctcacgcgcgtcgggctcgacatcggcaaggtgtgggtcgcggacgacggcgccgcggtggcggtctggaccacgccggagagcgtcgaagcgggggcggtgttcgccgagatcggcccgcgcatggccgagttgagcggttcccggctggccgcgcagcaacagatggaaggcctcctggcgccgcaccggcccaaggagcccgcgtggttcctggccaccgtcggcgtctcgcccgaccaccagggcaagggtctgggcagcgccgtcgtgctccccggagtggaggcggccgagcgcgccggggtgcccgccttcctggagacctccgcgccccgcaacctccccttctacgagcggctcggcttcaccgtcaccgccgacgtcgaggtgcccgaaggaccgcgcacctggtgcatgacccgcaagcccggtgcctga

SEQ ID NO: 8814 - DNA, 1764 bp, synthetic construct
  source 1..1764: mol_type = other DNA
atggccttaccagtgaccgccttgctcctgccgctggccttgctgctccacgccgccaggccgcaagtgcaactggttgaatccggtggcggcctggtgcaagcaggcggatctctcagacttagctgtgccgcctccggcagaaccttcacaatgggatggtttaggcaggctccagggaaagagagagagttcgtcgccgccatctctctgtctcccacactggcctactacgccgactctgtgagaggccggttcaccatctccagagataatgccaagaacaccgtgtacctgcaaatgaactctctgaaacccgaggatacagccgtgtactattgtgccgctgaccggaagtccgtgatgagcatcagacccgattactggggacagggcacacaagtcacagtgtcctctacgcgtaccacgacgccagcgccgcgaccaccaacaccggcgcccaccatcgcgtcgcagcccctgtccctgcgcccagaggcgtgccggccagcggcggggggcgcagtgcacacgagggggctggacttcgcctgtgacatctacatctgggcgcccttggccgggacttgtggggtccttctcctgtcactggttatcaccctttactgcaaacggggcagaaagaaactcctgtatatattcaaacaaccatttatgagaccagtacaaactactcaagaggaagatggctgtagctgccgatttccagaagaagaagaaggaggatgtgaactgagagtgaagttcagcaggagcgcagacgcccccgcgtaccagcagggccagaaccagctctataacgagctgaatctaggacgaagagaggagtacgatgttttggacaagagacgtggccgggaccctgagatggggggaaagccgagaaggaagaaccctcaggaaggcctgtacaatgaactgcagaaagataagatggcggaggcctacagtgagattgggatgaaaggcgagcgccggaggggcaaggggcacgatggcctttaccagggtctcagtacagccaccaaggacacctacgacgcccttcacatgcaggccctgccccctcgctctagtggctccggcgagggcagaggaagtctactaacctgcggagatgtggaagaaaatcctggcccacatatgaccgagtacaagcccacggtgcgcctcgccacccgcgacgacgtccccagggccgtacgcaccctcgccgccgcgttcgccgactaccccgccacgcgccacaccgtcgatccggaccgccacatcgagcgggtcaccgagctgcaagaactcttcctcacgcgcgtcgggctcgacatcggcaaggtgtgggtcgcggacgacggcgccgcggtggcggtctggaccacgccggagagcgtcgaagcgggggcggtgttcgccgagatcggcccgcgcatggccgagttgagcggttcccggctggccgcgcagcaacagatggaaggcctcctggcgccgcaccggcccaaggagcccgcgtggttcctggccaccgtcggcgtctcgcccgaccaccagggcaagggtctgggcagcgccgtcgtgctccccggagtggaggcggccgagcgcgccggggtgcccgccttcctggagacctccgcgccccgcaacctccccttctacgagcggctcggcttcaccgtcaccgccgacgtcgaggtgcccgaaggaccgcgcacctggtgcatgacccgcaagcccggtgcctga

SEQ ID NO: 8815 - DNA, 1764 bp, synthetic construct
  source 1..1764: mol_type = other DNA
atggccttaccagtgaccgccttgctcctgccgctggccttgctgctccacgccgccaggccgcaagtgcaactggttgaatccggtggcggcctggtgcaagcaggcggatctctcagacttagctgtgccgcctccggcagaaccttctctatgggatggtttaggcaggctccagggaaagagagagagttcgtcgccgccatctctctgtctcccacactggcctactacgccgactctgtgagaggccggttcaccatctccagagataatgccaagaacaccgtgtacctgcaaatgaactctctgaaacccgaggatacagccgtgtactattgtgccgctgaccggaagtccgtgatgagcatcagacccgattactggggacagggcacacaagtcacagtgtcctctacgcgtaccacgacgccagcgccgcgaccaccaacaccggcgcccaccatcgcgtcgcagcccctgtccctgcgcccagaggcgtgccggccagcggcggggggcgcagtgcacacgagggggctggacttcgcctgtgacatctacatctgggcgcccttggccgggacttgtggggtccttctcctgtcactggttatcaccctttactgcaaacggggcagaaagaaactcctgtatatattcaaacaaccatttatgagaccagtacaaactactcaagaggaagatggctgtagctgccgatttccagaagaagaagaaggaggatgtgaactgagagtgaagttcagcaggagcgcagacgcccccgcgtaccagcagggccagaaccagctctataacgagctgaatctaggacgaagagaggagtacgatgttttggacaagagacgtggccgggaccctgagatggggggaaagccgagaaggaagaaccctcaggaaggcctgtacaatgaactgcagaaagataagatggcggaggcctacagtgagattgggatgaaaggcgagcgccggaggggcaaggggcacgatggcctttaccagggtctcagtacagccaccaaggacacctacgacgcccttcacatgcaggccctgccccctcgctctagtggctccggcgagggcagaggaagtctactaacctgcggagatgtggaagaaaatcctggcccacatatgaccgagtacaagcccacggtgcgcctcgccacccgcgacgacgtccccagggccgtacgcaccctcgccgccgcgttcgccgactaccccgccacgcgccacaccgtcgatccggaccgccacatcgagcgggtcaccgagctgcaagaactcttcctcacgcgcgtcgggctcgacatcggcaaggtgtgggtcgcggacgacggcgccgcggtggcggtctggaccacgccggagagcgtcgaagcgggggcggtgttcgccgagatcggcccgcgcatggccgagttgagcggttcccggctggccgcgcagcaacagatggaaggcctcctggcgccgcaccggcccaaggagcccgcgtggttcctggccaccgtcggcgtctcgcccgaccaccagggcaagggtctgggcagcgccgtcgtgctccccggagtggaggcggccgagcgcgccggggtgcccgccttcctggagacctccgcgccccgcaacctccccttctacgagcggctcggcttcaccgtcaccgccgacgtcgaggtgcccgaaggaccgcgcacctggtgcatgacccgcaagcccggtgcctga

SEQ ID NO: 8816 - DNA, 1764 bp, synthetic construct
  source 1..1764: mol_type = other DNA
atggccttaccagtgaccgccttgctcctgccgctggccttgctgctccacgccgccaggccgcaagtgcaactggttgaatccggtggcggcctggtgcaagcaggcggatctctcagacttagctgtgccgcctccggcagaaccttctctatgggatggtttaggcaggctccagggaaagagagagagttcgtcgccgccatcaccctgtctcccacactggcctactacgccgactctgtgagaggccggttcaccatctccagagataatgccaagaacaccgtgtacctgcaaatgaactctctgaaacccgaggatacagccgtgtactattgtgccgctgaccggaagtccgtgatgagcatcagacccgattactggggacagggcacacaagtcacagtgtcctctacgcgtaccacgacgccagcgccgcgaccaccaacaccggcgcccaccatcgcgtcgcagcccctgtccctgcgcccagaggcgtgccggccagcggcggggggcgcagtgcacacgagggggctggacttcgcctgtgacatctacatctgggcgcccttggccgggacttgtggggtccttctcctgtcactggttatcaccctttactgcaaacggggcagaaagaaactcctgtatatattcaaacaaccatttatgagaccagtacaaactactcaagaggaagatggctgtagctgccgatttccagaagaagaagaaggaggatgtgaactgagagtgaagttcagcaggagcgcagacgcccccgcgtaccagcagggccagaaccagctctataacgagctgaatctaggacgaagagaggagtacgatgttttggacaagagacgtggccgggaccctgagatggggggaaagccgagaaggaagaaccctcaggaaggcctgtacaatgaactgcagaaagataagatggcggaggcctacagtgagattgggatgaaaggcgagcgccggaggggcaaggggcacgatggcctttaccagggtctcagtacagccaccaaggacacctacgacgcccttcacatgcaggccctgccccctcgctctagtggctccggcgagggcagaggaagtctactaacctgcggagatgtggaagaaaatcctggcccacatatgaccgagtacaagcccacggtgcgcctcgccacccgcgacgacgtccccagggccgtacgcaccctcgccgccgcgttcgccgactaccccgccacgcgccacaccgtcgatccggaccgccacatcgagcgggtcaccgagctgcaagaactcttcctcacgcgcgtcgggctcgacatcggcaaggtgtgggtcgcggacgacggcgccgcggtggcggtctggaccacgccggagagcgtcgaagcgggggcggtgttcgccgagatcggcccgcgcatggccgagttgagcggttcccggctggccgcgcagcaacagatggaaggcctcctggcgccgcaccggcccaaggagcccgcgtggttcctggccaccgtcggcgtctcgcccgaccaccagggcaagggtctgggcagcgccgtcgtgctccccggagtggaggcggccgagcgcgccggggtgcccgccttcctggagacctccgcgccccgcaacctccccttctacgagcggctcggcttcaccgtcaccgccgacgtcgaggtgcccgaaggaccgcgcacctggtgcatgacccgcaagcccggtgcctga

SEQ ID NO: 8817 - DNA, 1764 bp, synthetic construct
  source 1..1764: mol_type = other DNA
atggccttaccagtgaccgccttgctcctgccgctggccttgctgctccacgccgccaggccgcaagtgcaactgcaagaatccggtggcggcctggcacaagcaggcggatctctcagacttagctgtgccgcctccggcagaaccttctctatgggatggtttaggcaggctccagggaaagagagagagttcgtcgccgccatcaccctgtctcccacactggcctactacgccgactctgtgagaggccggttcaccatctccagagataatgccaagaacaccgtgtacctgcaaatgaactctctgaaacccgaggatacagccgtgtactattgtgccgctgaccggaagtccgtgatgagcatcagacccgattactggggacagggcacacaagtcacagtgtcctctacgcgtaccacgacgccagcgccgcgaccaccaacaccggcgcccaccatcgcgtcgcagcccctgtccctgcgcccagaggcgtgccggccagcggcggggggcgcagtgcacacgagggggctggacttcgcctgtgacatctacatctgggcgcccttggccgggacttgtggggtccttctcctgtcactggttatcaccctttactgcaaacggggcagaaagaaactcctgtatatattcaaacaaccatttatgagaccagtacaaactactcaagaggaagatggctgtagctgccgatttccagaagaagaagaaggaggatgtgaactgagagtgaagttcagcaggagcgcagacgcccccgcgtaccagcagggccagaaccagctctataacgagctgaatctaggacgaagagaggagtacgatgttttggacaagagacgtggccgggaccctgagatggggggaaagccgagaaggaagaaccctcaggaaggcctgtacaatgaactgcagaaagataagatggcggaggcctacagtgagattgggatgaaaggcgagcgccggaggggcaaggggcacgatggcctttaccagggtctcagtacagccaccaaggacacctacgacgcccttcacatgcaggccctgccccctcgctctagtggctccggcgagggcagaggaagtctactaacctgcggagatgtggaagaaaatcctggcccacatatgaccgagtacaagcccacggtgcgcctcgccacccgcgacgacgtccccagggccgtacgcaccctcgccgccgcgttcgccgactaccccgccacgcgccacaccgtcgatccggaccgccacatcgagcgggtcaccgagctgcaagaactcttcctcacgcgcgtcgggctcgacatcggcaaggtgtgggtcgcggacgacggcgccgcggtggcggtctggaccacgccggagagcgtcgaagcgggggcggtgttcgccgagatcggcccgcgcatggccgagttgagcggttcccggctggccgcgcagcaacagatggaaggcctcctggcgccgcaccggcccaaggagcccgcgtggttcctggccaccgtcggcgtctcgcccgaccaccagggcaagggtctgggcagcgccgtcgtgctccccggagtggaggcggccgagcgcgccggggtgcccgccttcctggagacctccgcgccccgcaacctccccttctacgagcggctcggcttcaccgtcaccgccgacgtcgaggtgcccgaaggaccgcgcacctggtgcatgacccgcaagcccggtgcctga

SEQ ID NO: 8818 - DNA, 1764 bp, synthetic construct
  source 1..1764: mol_type = other DNA
atggccttaccagtgaccgccttgctcctgccgctggccttgctgctccacgccgccaggccgcaagtgcaactggttgaatccggtggcggcctggcacaaccaggcggatctctcagacttagctgtgccgcctccggcagaaccttctctatgggatggtttaggcaggctccagggaaagagagagagttcgtcgccgccatcaccctgtctcccacactggcctactacgccgactctgtgagaggccggttcaccatctccagagataatgccaagaacaccgtgtacctgcaaatgaactctctgaaacccgaggatacagccgtgtactattgtgccgctgaccggaagtccgtgatgagcatcagacccgattactggggacagggcacacaagtcacagtgtcctctacgcgtaccacgacgccagcgccgcgaccaccaacaccggcgcccaccatcgcgtcgcagcccctgtccctgcgcccagaggcgtgccggccagcggcggggggcgcagtgcacacgagggggctggacttcgcctgtgacatctacatctgggcgcccttggccgggacttgtggggtccttctcctgtcactggttatcaccctttactgcaaacggggcagaaagaaactcctgtatatattcaaacaaccatttatgagaccagtacaaactactcaagaggaagatggctgtagctgccgatttccagaagaagaagaaggaggatgtgaactgagagtgaagttcagcaggagcgcagacgcccccgcgtaccagcagggccagaaccagctctataacgagctgaatctaggacgaagagaggagtacgatgttttggacaagagacgtggccgggaccctgagatggggggaaagccgagaaggaagaaccctcaggaaggcctgtacaatgaactgcagaaagataagatggcggaggcctacagtgagattgggatgaaaggcgagcgccggaggggcaaggggcacgatggcctttaccagggtctcagtacagccaccaaggacacctacgacgcccttcacatgcaggccctgccccctcgctctagtggctccggcgagggcagaggaagtctactaacctgcggagatgtggaagaaaatcctggcccacatatgaccgagtacaagcccacggtgcgcctcgccacccgcgacgacgtccccagggccgtacgcaccctcgccgccgcgttcgccgactaccccgccacgcgccacaccgtcgatccggaccgccacatcgagcgggtcaccgagctgcaagaactcttcctcacgcgcgtcgggctcgacatcggcaaggtgtgggtcgcggacgacggcgccgcggtggcggtctggaccacgccggagagcgtcgaagcgggggcggtgttcgccgagatcggcccgcgcatggccgagttgagcggttcccggctggccgcgcagcaacagatggaaggcctcctggcgccgcaccggcccaaggagcccgcgtggttcctggccaccgtcggcgtctcgcccgaccaccagggcaagggtctgggcagcgccgtcgtgctccccggagtggaggcggccgagcgcgccggggtgcccgccttcctggagacctccgcgccccgcaacctccccttctacgagcggctcggcttcaccgtcaccgccgacgtcgaggtgcccgaaggaccgcgcacctggtgcatgacccgcaagcccggtgcctga

SEQ ID NO: 8819 - DNA, 2142 bp, synthetic construct
  source 1..2142: mol_type = other DNA
atggccttaccagtgaccgccttgctcctgccgctggccttgctgctccacgccgccaggccgagctacgtgctgacacagcctccatccgtgtctgtggctccaggacagaccgccagaatcacatgcggcggcaacaacatcggcagccagagcgtgcactggtatcagcagaagcctggacaggctccagtgctggtggtgtacgacgacagcgatagacctagcggcatccccgagagattcagcggcagcaattccggcaataccgccacactgaccatcagcagagtggaagctggcgacgaggccgactactactgccaagtgtgggacagcagcagcgatcacgtggtgtttggcggcggaacaaagctgacagtgcttggcggaggcggatctggcggcggaggtagcggtggcggaggatctcaactccagctgcaagagtctggccctggcctggtcaagcctagcgaaacactgagcctgacctgtaccgtgtctggcggctctatcagctccaacagctatttctggggctggatcagacaacctcctggcaaaggactggaatggatcggctccatctactacagcggcagcacctactacaaccccaccctgaagtccagagtgaccatctccgtggacaccagcaagaaccagttctccctgaagctgagcagcgtgacagccgccgataccgccgtgtattattgtgccagacatgacggcgctgtggccggcctgtttgattattggggacagggcaccctggtcaccgtgtcatctacgcgtaccacgacgccagcgccgcgaccaccaacaccggcgcccaccatcgcgtcgcagcccctgtccctgcgcccagaggcgtgccggccagcggcggggggcgcagtgcacacgagggggctggacttcgcctgtgacatctacatctgggcgcccttggccgggacttgtggggtccttctcctgtcactggttatcaccctttactgcaaacggggcagaaagaaactcctgtatatattcaaacaaccatttatgagaccagtacaaactactcaagaggaagatggctgtagctgccgatttccagaagaagaagaaggaggatgtgaactgagagtgaagttcagcaggagcgcagacgcccccgcgtaccagcagggccagaaccagctctataacgagctgaatctaggacgaagagaggagtacgatgttttggacaagagacgtggccgggaccctgagatggggggaaagccgagaaggaagaaccctcaggaaggcctgtacaatgaactgcagaaagataagatggcggaggcctacagtgagattgggatgaaaggcgagcgccggaggggcaaggggcacgatggcctttaccagggtctcagtacagccaccaaggacacctacgacgcccttcacatgcaggccctgccccctcgctctagtggctccggcgagggcagaggaagtctactaacctgcggagatgtggaagaaaatcctggcccacatatgaccgagtacaagcccacggtgcgcctcgccacccgcgacgacgtccccagggccgtacgcaccctcgccgccgcgttcgccgactaccccgccacgcgccacaccgtcgatccggaccgccacatcgagcgggtcaccgagctgcaagaactcttcctcacgcgcgtcgggctcgacatcggcaaggtgtgggtcgcggacgacggcgccgcggtggcggtctggaccacgccggagagcgtcgaagcgggggcggtgttcgccgagatcggcccgcgcatggccgagttgagcggttcccggctggccgcgcagcaacagatggaaggcctcctggcgccgcaccggcccaaggagcccgcgtggttcctggccaccgtcggcgtctcgcccgaccaccagggcaagggtctgggcagcgccgtcgtgctccccggagtggaggcggccgagcgcgccggggtgcccgccttcctggagacctccgcgccccgcaacctccccttctacgagcggctcggcttcaccgtcaccgccgacgtcgaggtgcccgaaggaccgcgcacctggtgcatgacccgcaagcccggtgcctga

SEQ ID NO: 8820 - DNA, 1785 bp, synthetic construct
  source 1..1785: mol_type = other DNA
atggccttaccagtgaccgccttgctcctgccgctggccttgctgctccacgccgccaggccgcaggtgcagctggttgaatctggcggaggactggttcagcctggcggatctctgagactgtcttgtgccgccagcggcaacatcaacagcagatcctgcatgggctggttcagacaggcccctggcaagggaagagaaggcgtggcagctatcggacaagtgaccggcagaacctactacgtggacagcgtgaagggcagattcaccatcagcctggacaacagcaagaacaccctgtacctccagatgaacagcctgagagccgaggacaccgccgtgtactattgtgctgctgcccctggctgtctgctgtctgcacttagaagcgccgactacagaaactggggccagggcacactggtcaccgtttcttctacgcgtaccacgacgccagcgccgcgaccaccaacaccggcgcccaccatcgcgtcgcagcccctgtccctgcgcccagaggcgtgccggccagcggcggggggcgcagtgcacacgagggggctggacttcgcctgtgacatctacatctgggcgcccttggccgggacttgtggggtccttctcctgtcactggttatcaccctttactgcaaacggggcagaaagaaactcctgtatatattcaaacaaccatttatgagaccagtacaaactactcaagaggaagatggctgtagctgccgatttccagaagaagaagaaggaggatgtgaactgagagtgaagttcagcaggagcgcagacgcccccgcgtaccagcagggccagaaccagctctataacgagctgaatctaggacgaagagaggagtacgatgttttggacaagagacgtggccgggaccctgagatggggggaaagccgagaaggaagaaccctcaggaaggcctgtacaatgaactgcagaaagataagatggcggaggcctacagtgagattgggatgaaaggcgagcgccggaggggcaaggggcacgatggcctttaccagggtctcagtacagccaccaaggacacctacgacgcccttcacatgcaggccctgccccctcgctctagtggctccggcgagggcagaggaagtctactaacctgcggagatgtggaagaaaatcctggcccacatatgaccgagtacaagcccacggtgcgcctcgccacccgcgacgacgtccccagggccgtacgcaccctcgccgccgcgttcgccgactaccccgccacgcgccacaccgtcgatccggaccgccacatcgagcgggtcaccgagctgcaagaactcttcctcacgcgcgtcgggctcgacatcggcaaggtgtgggtcgcggacgacggcgccgcggtggcggtctggaccacgccggagagcgtcgaagcgggggcggtgttcgccgagatcggcccgcgcatggccgagttgagcggttcccggctggccgcgcagcaacagatggaaggcctcctggcgccgcaccggcccaaggagcccgcgtggttcctggccaccgtcggcgtctcgcccgaccaccagggcaagggtctgggcagcgccgtcgtgctccccggagtggaggcggccgagcgcgccggggtgcccgccttcctggagacctccgcgccccgcaacctccccttctacgagcggctcggcttcaccgtcaccgccgacgtcgaggtgcccgaaggaccgcgcacctggtgcatgacccgcaagcccggtgcctga

SEQ ID NO: 8821 - DNA, 1785 bp, synthetic construct
  source 1..1785: mol_type = other DNA
atggccttaccagtgaccgccttgctcctgccgctggccttgctgctccacgccgccaggccgcaggtgcagctggttgaatctggcggaggactggttcagcctggcggatctctgagactgtcttgtgccgccagcggcagcatcaacagcagatcctgcatgggctggttcagacaggcccctggcaagggaagagaaggcgtggcagctatcggacaagtgaccggcagaacctactacgtggacagcgtgaagggcagattcaccatcagcctggacaacagcaagaacaccctgtacctccagatgaacagcctgagagccgaggacaccgccgtgtactattgtgctgctgcccctggctgtctgctgtctgcacttagaagcgccgactacagaaactggggccagggcacactggtcaccgtttcttctacgcgtaccacgacgccagcgccgcgaccaccaacaccggcgcccaccatcgcgtcgcagcccctgtccctgcgcccagaggcgtgccggccagcggcggggggcgcagtgcacacgagggggctggacttcgcctgtgacatctacatctgggcgcccttggccgggacttgtggggtccttctcctgtcactggttatcaccctttactgcaaacggggcagaaagaaactcctgtatatattcaaacaaccatttatgagaccagtacaaactactcaagaggaagatggctgtagctgccgatttccagaagaagaagaaggaggatgtgaactgagagtgaagttcagcaggagcgcagacgcccccgcgtaccagcagggccagaaccagctctataacgagctgaatctaggacgaagagaggagtacgatgttttggacaagagacgtggccgggaccctgagatggggggaaagccgagaaggaagaaccctcaggaaggcctgtacaatgaactgcagaaagataagatggcggaggcctacagtgagattgggatgaaaggcgagcgccggaggggcaaggggcacgatggcctttaccagggtctcagtacagccaccaaggacacctacgacgcccttcacatgcaggccctgccccctcgctctagtggctccggcgagggcagaggaagtctactaacctgcggagatgtggaagaaaatcctggcccacatatgaccgagtacaagcccacggtgcgcctcgccacccgcgacgacgtccccagggccgtacgcaccctcgccgccgcgttcgccgactaccccgccacgcgccacaccgtcgatccggaccgccacatcgagcgggtcaccgagctgcaagaactcttcctcacgcgcgtcgggctcgacatcggcaaggtgtgggtcgcggacgacggcgccgcggtggcggtctggaccacgccggagagcgtcgaagcgggggcggtgttcgccgagatcggcccgcgcatggccgagttgagcggttcccggctggccgcgcagcaacagatggaaggcctcctggcgccgcaccggcccaaggagcccgcgtggttcctggccaccgtcggcgtctcgcccgaccaccagggcaagggtctgggcagcgccgtcgtgctccccggagtggaggcggccgagcgcgccggggtgcccgccttcctggagacctccgcgccccgcaacctccccttctacgagcggctcggcttcaccgtcaccgccgacgtcgaggtgcccgaaggaccgcgcacctggtgcatgacccgcaagcccggtgcctga

SEQ ID NO: 8822 - DNA, 1785 bp, synthetic construct
  source 1..1785: mol_type = other DNA
atggccttaccagtgaccgccttgctcctgccgctggccttgctgctccacgccgccaggccgcaggtgcagctggttgaatctggcggaggatctgttcaggctggcggctctctgagactgtcttgtggcgcttccggcaacatcaacagcagaaactgcatgggctggttcagacaggcccctggcaaagagagagaaggcgttgccgccatcggacaagtgaccggcagatcctactacgtggacagcgtgaagggcagattcaccatcagcctggacaacgccaagaacaccctgtacctccagatgaacacactgaagcccgaggacaccgccatgtactactgtgctgctgcccctggctgtctgctgtctgcacttagaagcgccgactacagaaactggggccagggaacccaagtgacagtgtctagtacgcgtaccacgacgccagcgccgcgaccaccaacaccggcgcccaccatcgcgtcgcagcccctgtccctgcgcccagaggcgtgccggccagcggcggggggcgcagtgcacacgagggggctggacttcgcctgtgacatctacatctgggcgcccttggccgggacttgtggggtccttctcctgtcactggttatcaccctttactgcaaacggggcagaaagaaactcctgtatatattcaaacaaccatttatgagaccagtacaaactactcaagaggaagatggctgtagctgccgatttccagaagaagaagaaggaggatgtgaactgagagtgaagttcagcaggagcgcagacgcccccgcgtaccagcagggccagaaccagctctataacgagctgaatctaggacgaagagaggagtacgatgttttggacaagagacgtggccgggaccctgagatggggggaaagccgagaaggaagaaccctcaggaaggcctgtacaatgaactgcagaaagataagatggcggaggcctacagtgagattgggatgaaaggcgagcgccggaggggcaaggggcacgatggcctttaccagggtctcagtacagccaccaaggacacctacgacgcccttcacatgcaggccctgccccctcgctctagtggctccggcgagggcagaggaagtctactaacctgcggagatgtggaagaaaatcctggcccacatatgaccgagtacaagcccacggtgcgcctcgccacccgcgacgacgtccccagggccgtacgcaccctcgccgccgcgttcgccgactaccccgccacgcgccacaccgtcgatccggaccgccacatcgagcgggtcaccgagctgcaagaactcttcctcacgcgcgtcgggctcgacatcggcaaggtgtgggtcgcggacgacggcgccgcggtggcggtctggaccacgccggagagcgtcgaagcgggggcggtgttcgccgagatcggcccgcgcatggccgagttgagcggttcccggctggccgcgcagcaacagatggaaggcctcctggcgccgcaccggcccaaggagcccgcgtggttcctggccaccgtcggcgtctcgcccgaccaccagggcaagggtctgggcagcgccgtcgtgctccccggagtggaggcggccgagcgcgccggggtgcccgccttcctggagacctccgcgccccgcaacctccccttctacgagcggctcggcttcaccgtcaccgccgacgtcgaggtgcccgaaggaccgcgcacctggtgcatgacccgcaagcccggtgcctga

SEQ ID NO: 8823 - DNA, 1785 bp, synthetic construct
  source 1..1785: mol_type = other DNA
atggccttaccagtgaccgccttgctcctgccgctggccttgctgctccacgccgccaggccgcaggtgcagctggttgaatctggcggaggatctgttcaggctggcggctctctgagactgtcttgtggcgcttccggcaacatcagcagcagaaactgcatgggctggttcagacaggcccctggcaaagagagagaaggcgttgccgccatcggacaagtgaccggcagaacctactacgtggacagcgtgaagggcagattcaccatcagcctggacaacgccaagaacaccctgtacctccagatgaacacactgaagcccgaggacaccgccatgtactactgtgctgctgcccctggctgtctgctgtctgcacttagaagcgccgactacagaaactggggccagggaacccaagtgacagtgtctagtacgcgtaccacgacgccagcgccgcgaccaccaacaccggcgcccaccatcgcgtcgcagcccctgtccctgcgcccagaggcgtgccggccagcggcggggggcgcagtgcacacgagggggctggacttcgcctgtgacatctacatctgggcgcccttggccgggacttgtggggtccttctcctgtcactggttatcaccctttactgcaaacggggcagaaagaaactcctgtatatattcaaacaaccatttatgagaccagtacaaactactcaagaggaagatggctgtagctgccgatttccagaagaagaagaaggaggatgtgaactgagagtgaagttcagcaggagcgcagacgcccccgcgtaccagcagggccagaaccagctctataacgagctgaatctaggacgaagagaggagtacgatgttttggacaagagacgtggccgggaccctgagatggggggaaagccgagaaggaagaaccctcaggaaggcctgtacaatgaactgcagaaagataagatggcggaggcctacagtgagattgggatgaaaggcgagcgccggaggggcaaggggcacgatggcctttaccagggtctcagtacagccaccaaggacacctacgacgcccttcacatgcaggccctgccccctcgctctagtggctccggcgagggcagaggaagtctactaacctgcggagatgtggaagaaaatcctggcccacatatgaccgagtacaagcccacggtgcgcctcgccacccgcgacgacgtccccagggccgtacgcaccctcgccgccgcgttcgccgactaccccgccacgcgccacaccgtcgatccggaccgccacatcgagcgggtcaccgagctgcaagaactcttcctcacgcgcgtcgggctcgacatcggcaaggtgtgggtcgcggacgacggcgccgcggtggcggtctggaccacgccggagagcgtcgaagcgggggcggtgttcgccgagatcggcccgcgcatggccgagttgagcggttcccggctggccgcgcagcaacagatggaaggcctcctggcgccgcaccggcccaaggagcccgcgtggttcctggccaccgtcggcgtctcgcccgaccaccagggcaagggtctgggcagcgccgtcgtgctccccggagtggaggcggccgagcgcgccggggtgcccgccttcctggagacctccgcgccccgcaacctccccttctacgagcggctcggcttcaccgtcaccgccgacgtcgaggtgcccgaaggaccgcgcacctggtgcatgacccgcaagcccggtgcctga

SEQ ID NO: 8824 - DNA, 1785 bp, synthetic construct
  source 1..1785: mol_type = other DNA
atggccttaccagtgaccgccttgctcctgccgctggccttgctgctccacgccgccaggccggaagtgcagctgctggaatctggcggaggactggttcaggctggcggatctctgagactgtcttgtgccgccagcggcaacatcaacagcagatcctgcatgggctggttcagacaggcccctggcaagggaagagaaggcgtggcagctatcggacaagtgaccggcagaacctactacgtggacagcgtgaagggcagattcaccatcagcctggacaacagcaagaacaccctgtacctccagatgaacagcctgagagccgaggacaccgccgtgtactattgtgctgctgcccctggctgtctgctgtctgcacttagaagcgccgactacagaaactggggccagggcacactggtcaccgtttcttctacgcgtaccacgacgccagcgccgcgaccaccaacaccggcgcccaccatcgcgtcgcagcccctgtccctgcgcccagaggcgtgccggccagcggcggggggcgcagtgcacacgagggggctggacttcgcctgtgacatctacatctgggcgcccttggccgggacttgtggggtccttctcctgtcactggttatcaccctttactgcaaacggggcagaaagaaactcctgtatatattcaaacaaccatttatgagaccagtacaaactactcaagaggaagatggctgtagctgccgatttccagaagaagaagaaggaggatgtgaactgagagtgaagttcagcaggagcgcagacgcccccgcgtaccagcagggccagaaccagctctataacgagctgaatctaggacgaagagaggagtacgatgttttggacaagagacgtggccgggaccctgagatggggggaaagccgagaaggaagaaccctcaggaaggcctgtacaatgaactgcagaaagataagatggcggaggcctacagtgagattgggatgaaaggcgagcgccggaggggcaaggggcacgatggcctttaccagggtctcagtacagccaccaaggacacctacgacgcccttcacatgcaggccctgccccctcgctctagtggctccggcgagggcagaggaagtctactaacctgcggagatgtggaagaaaatcctggcccacatatgaccgagtacaagcccacggtgcgcctcgccacccgcgacgacgtccccagggccgtacgcaccctcgccgccgcgttcgccgactaccccgccacgcgccacaccgtcgatccggaccgccacatcgagcgggtcaccgagctgcaagaactcttcctcacgcgcgtcgggctcgacatcggcaaggtgtgggtcgcggacgacggcgccgcggtggcggtctggaccacgccggagagcgtcgaagcgggggcggtgttcgccgagatcggcccgcgcatggccgagttgagcggttcccggctggccgcgcagcaacagatggaaggcctcctggcgccgcaccggcccaaggagcccgcgtggttcctggccaccgtcggcgtctcgcccgaccaccagggcaagggtctgggcagcgccgtcgtgctccccggagtggaggcggccgagcgcgccggggtgcccgccttcctggagacctccgcgccccgcaacctccccttctacgagcggctcggcttcaccgtcaccgccgacgtcgaggtgcccgaaggaccgcgcacctggtgcatgacccgcaagcccggtgcctga

SEQ ID NO: 8825 - DNA, 1764 bp, synthetic construct
  source 1..1764: mol_type = other DNA
atggccttaccagtgaccgccttgctcctgccgctggccttgctgctccacgccgccaggccggaagtgcagctggttgaatctggcggaggactggttcaggctggcggatctctgagactgtcttgtgccgccagcggcagaacctttacaatgggctggtttagacaggcccctggcaaagagagagagttcgtcgccgccatcacatactctggcggcagcccttactacgccgactctgtgaagggcagattcaccatcagccgggacaacgccaagaacaccgtggtgctccagatgaacagcctgaagcctgaggacaccgccctgtactactgcgccgccaatccaacatacggcagcgactggaacgccgagaattggggccagggaacccaagtgacagtgtctagcacgcgtaccacgacgccagcgccgcgaccaccaacaccggcgcccaccatcgcgtcgcagcccctgtccctgcgcccagaggcgtgccggccagcggcggggggcgcagtgcacacgagggggctggacttcgcctgtgacatctacatctgggcgcccttggccgggacttgtggggtccttctcctgtcactggttatcaccctttactgcaaacggggcagaaagaaactcctgtatatattcaaacaaccatttatgagaccagtacaaactactcaagaggaagatggctgtagctgccgatttccagaagaagaagaaggaggatgtgaactgagagtgaagttcagcaggagcgcagacgcccccgcgtaccagcagggccagaaccagctctataacgagctgaatctaggacgaagagaggagtacgatgttttggacaagagacgtggccgggaccctgagatggggggaaagccgagaaggaagaaccctcaggaaggcctgtacaatgaactgcagaaagataagatggcggaggcctacagtgagattgggatgaaaggcgagcgccggaggggcaaggggcacgatggcctttaccagggtctcagtacagccaccaaggacacctacgacgcccttcacatgcaggccctgccccctcgctctagtggctccggcgagggcagaggaagtctactaacctgcggagatgtggaagaaaatcctggcccacatatgaccgagtacaagcccacggtgcgcctcgccacccgcgacgacgtccccagggccgtacgcaccctcgccgccgcgttcgccgactaccccgccacgcgccacaccgtcgatccggaccgccacatcgagcgggtcaccgagctgcaagaactcttcctcacgcgcgtcgggctcgacatcggcaaggtgtgggtcgcggacgacggcgccgcggtggcggtctggaccacgccggagagcgtcgaagcgggggcggtgttcgccgagatcggcccgcgcatggccgagttgagcggttcccggctggccgcgcagcaacagatggaaggcctcctggcgccgcaccggcccaaggagcccgcgtggttcctggccaccgtcggcgtctcgcccgaccaccagggcaagggtctgggcagcgccgtcgtgctccccggagtggaggcggccgagcgcgccggggtgcccgccttcctggagacctccgcgccccgcaacctccccttctacgagcggctcggcttcaccgtcaccgccgacgtcgaggtgcccgaaggaccgcgcacctggtgcatgacccgcaagcccggtgcctga

SEQ ID NO: 8826 - DNA, 1764 bp, synthetic construct
  source 1..1764: mol_type = other DNA
atggccttaccagtgaccgccttgctcctgccgctggccttgctgctccacgccgccaggccggaagtgcagctggttgaatctggcggaggactggttcaggctggcggatctctgagactgtcttgtgccgccagcggcagaacctttacaatgggctggtttagacaggcccctggcaaagagagagagttcgtcgccgccatcagctactctggcggcagcccttactacgccgactctgtgaagggcagattcaccatcagccgggacaacgccaagaacaccgtggtgctccagatgaacagcctgaagcctgaggacaccgccctgtactactgcgccgccaatccaacatacggcagcgactggaacgccgagaattggggccagggaacccaagtgacagtgtctagcacgcgtaccacgacgccagcgccgcgaccaccaacaccggcgcccaccatcgcgtcgcagcccctgtccctgcgcccagaggcgtgccggccagcggcggggggcgcagtgcacacgagggggctggacttcgcctgtgacatctacatctgggcgcccttggccgggacttgtggggtccttctcctgtcactggttatcaccctttactgcaaacggggcagaaagaaactcctgtatatattcaaacaaccatttatgagaccagtacaaactactcaagaggaagatggctgtagctgccgatttccagaagaagaagaaggaggatgtgaactgagagtgaagttcagcaggagcgcagacgcccccgcgtaccagcagggccagaaccagctctataacgagctgaatctaggacgaagagaggagtacgatgttttggacaagagacgtggccgggaccctgagatggggggaaagccgagaaggaagaaccctcaggaaggcctgtacaatgaactgcagaaagataagatggcggaggcctacagtgagattgggatgaaaggcgagcgccggaggggcaaggggcacgatggcctttaccagggtctcagtacagccaccaaggacacctacgacgcccttcacatgcaggccctgccccctcgctctagtggctccggcgagggcagaggaagtctactaacctgcggagatgtggaagaaaatcctggcccacatatgaccgagtacaagcccacggtgcgcctcgccacccgcgacgacgtccccagggccgtacgcaccctcgccgccgcgttcgccgactaccccgccacgcgccacaccgtcgatccggaccgccacatcgagcgggtcaccgagctgcaagaactcttcctcacgcgcgtcgggctcgacatcggcaaggtgtgggtcgcggacgacggcgccgcggtggcggtctggaccacgccggagagcgtcgaagcgggggcggtgttcgccgagatcggcccgcgcatggccgagttgagcggttcccggctggccgcgcagcaacagatggaaggcctcctggcgccgcaccggcccaaggagcccgcgtggttcctggccaccgtcggcgtctcgcccgaccaccagggcaagggtctgggcagcgccgtcgtgctccccggagtggaggcggccgagcgcgccggggtgcccgccttcctggagacctccgcgccccgcaacctccccttctacgagcggctcggcttcaccgtcaccgccgacgtcgaggtgcccgaaggaccgcgcacctggtgcatgacccgcaagcccggtgcctga

SEQ ID NO: 8827 - DNA, 1764 bp, synthetic construct
  source 1..1764: mol_type = other DNA
atggactggatttggcgcatccttttccttgtcggcgctgctaccggcgcccattccgggcccgaagtgcagctgctggaatctggcggaggactggttcaggctggcggatctctgagactgtcttgtgccgccagcggcagaacctttagcatgggctggtttagacaggcccctggcaaagagagagagttcgtcgccgccatcacatactctggcggcagcccttactacgccgactctgtgaagggcagattcaccatcagccgggacaacgccaagaacaccgtgtacctccagatgaacagcctgaagcctgaggacaccgccgtgtactactgcgccgccaatccaacatacggcagcgactggaacgccgagaattggggccagggaacccaagtgacagtgtctagcacgcgtaccacgacgccagcgccgcgaccaccaacaccggcgcccaccatcgcgtcgcagcccctgtccctgcgcccagaggcgtgccggccagcggcggggggcgcagtgcacacgagggggctggacttcgcctgtgacatctacatctgggcgcccttggccgggacttgtggggtccttctcctgtcactggttatcaccctttactgcaaacggggcagaaagaaactcctgtatatattcaaacaaccatttatgagaccagtacaaactactcaagaggaagatggctgtagctgccgatttccagaagaagaagaaggaggatgtgaactgagagtgaagttcagcaggagcgcagacgcccccgcgtaccagcagggccagaaccagctctataacgagctgaatctaggacgaagagaggagtacgatgttttggacaagagacgtggccgggaccctgagatggggggaaagccgagaaggaagaaccctcaggaaggcctgtacaatgaactgcagaaagataagatggcggaggcctacagtgagattgggatgaaaggcgagcgccggaggggcaaggggcacgatggcctttaccagggtctcagtacagccaccaaggacacctacgacgcccttcacatgcaggccctgccccctcgctctagtggctccggcgagggcagaggaagtctactaacctgcggagatgtggaagaaaatcctggcccacatatgaccgagtacaagcccacggtgcgcctcgccacccgcgacgacgtccccagggccgtacgcaccctcgccgccgcgttcgccgactaccccgccacgcgccacaccgtcgatccggaccgccacatcgagcgggtcaccgagctgcaagaactcttcctcacgcgcgtcgggctcgacatcggcaaggtgtgggtcgcggacgacggcgccgcggtggcggtctggaccacgccggagagcgtcgaagcgggggcggtgttcgccgagatcggcccgcgcatggccgagttgagcggttcccggctggccgcgcagcaacagatggaaggcctcctggcgccgcaccggcccaaggagcccgcgtggttcctggccaccgtcggcgtctcgcccgaccaccagggcaagggtctgggcagcgccgtcgtgctccccggagtggaggcggccgagcgcgccggggtgcccgccttcctggagacctccgcgccccgcaacctccccttctacgagcggctcggcttcaccgtcaccgccgacgtcgaggtgcccgaaggaccgcgcacctggtgcatgacccgcaagcccggtgcctga

SEQ ID NO: 8828 - DNA, 1764 bp, synthetic construct
  source 1..1764: mol_type = other DNA
atggactggatttggcgcatccttttccttgtcggcgctgctaccggcgcccattccgggcccgaagtgcagctgctggaatctggcggaggactggttcaggctggcggatctctgagactgtcttgtgccgccagcggcagaacctttagcatgggctggtttagacaggcccctggcaaagagagagagttcgtcgccgccatcacatactctggcggcagcccttactacgccgactctgtgaagggcagattcaccatcagccgggacaacgccaagaacaccgtgtacctccagatgaacagcctgaagcctgaggacaccgccgtgtactactgcgccgccaatccaacatacggcagcgactggaacgccgagaattggggccagggaaccctggtgacagtgtctagcacgcgtaccacgacgccagcgccgcgaccaccaacaccggcgcccaccatcgcgtcgcagcccctgtccctgcgcccagaggcgtgccggccagcggcggggggcgcagtgcacacgagggggctggacttcgcctgtgacatctacatctgggcgcccttggccgggacttgtggggtccttctcctgtcactggttatcaccctttactgcaaacggggcagaaagaaactcctgtatatattcaaacaaccatttatgagaccagtacaaactactcaagaggaagatggctgtagctgccgatttccagaagaagaagaaggaggatgtgaactgagagtgaagttcagcaggagcgcagacgcccccgcgtaccagcagggccagaaccagctctataacgagctgaatctaggacgaagagaggagtacgatgttttggacaagagacgtggccgggaccctgagatggggggaaagccgagaaggaagaaccctcaggaaggcctgtacaatgaactgcagaaagataagatggcggaggcctacagtgagattgggatgaaaggcgagcgccggaggggcaaggggcacgatggcctttaccagggtctcagtacagccaccaaggacacctacgacgcccttcacatgcaggccctgccccctcgctctagtggctccggcgagggcagaggaagtctactaacctgcggagatgtggaagaaaatcctggcccacatatgaccgagtacaagcccacggtgcgcctcgccacccgcgacgacgtccccagggccgtacgcaccctcgccgccgcgttcgccgactaccccgccacgcgccacaccgtcgatccggaccgccacatcgagcgggtcaccgagctgcaagaactcttcctcacgcgcgtcgggctcgacatcggcaaggtgtgggtcgcggacgacggcgccgcggtggcggtctggaccacgccggagagcgtcgaagcgggggcggtgttcgccgagatcggcccgcgcatggccgagttgagcggttcccggctggccgcgcagcaacagatggaaggcctcctggcgccgcaccggcccaaggagcccgcgtggttcctggccaccgtcggcgtctcgcccgaccaccagggcaagggtctgggcagcgccgtcgtgctccccggagtggaggcggccgagcgcgccggggtgcccgccttcctggagacctccgcgccccgcaacctccccttctacgagcggctcggcttcaccgtcaccgccgacgtcgaggtgcccgaaggaccgcgcacctggtgcatgacccgcaagcccggtgcctga

SEQ ID NO: 8829 - DNA, 1776 bp, synthetic construct
  source 1..1776: mol_type = other DNA
atggccttaccagtgaccgccttgctcctgccgctggccttgctgctccacgccgccaggccgcaggttcagctgcaagagtctggccctggcctggtcaagcctagccaaacactgagcctgacctgtaccgtgtctggcggctctatcaccaccggcgagttctactggaactggttcagacagcctcctggcaaaggactggaatggatgggagccgtggccgccagcggcagcacaacatacagccctagcttcgagagccggaccagcatcagcagagacaccagcaagaatcagttcagcctgaagctgagcagcgtgacagccgccgatacagccctgtattactgcggcagatcctttggagtggccgccattacaaccggccagaatagaggacagggcaccctggtcacagtgtctagcacgcgtaccacgacgccagcgccgcgaccaccaacaccggcgcccaccatcgcgtcgcagcccctgtccctgcgcccagaggcgtgccggccagcggcggggggcgcagtgcacacgagggggctggacttcgcctgtgacatctacatctgggcgcccttggccgggacttgtggggtccttctcctgtcactggttatcaccctttactgcaaacggggcagaaagaaactcctgtatatattcaaacaaccatttatgagaccagtacaaactactcaagaggaagatggctgtagctgccgatttccagaagaagaagaaggaggatgtgaactgagagtgaagttcagcaggagcgcagacgcccccgcgtaccagcagggccagaaccagctctataacgagctgaatctaggacgaagagaggagtacgatgttttggacaagagacgtggccgggaccctgagatggggggaaagccgagaaggaagaaccctcaggaaggcctgtacaatgaactgcagaaagataagatggcggaggcctacagtgagattgggatgaaaggcgagcgccggaggggcaaggggcacgatggcctttaccagggtctcagtacagccaccaaggacacctacgacgcccttcacatgcaggccctgccccctcgctctagtggctccggcgagggcagaggaagtctactaacctgcggagatgtggaagaaaatcctggcccacatatgaccgagtacaagcccacggtgcgcctcgccacccgcgacgacgtccccagggccgtacgcaccctcgccgccgcgttcgccgactaccccgccacgcgccacaccgtcgatccggaccgccacatcgagcgggtcaccgagctgcaagaactcttcctcacgcgcgtcgggctcgacatcggcaaggtgtgggtcgcggacgacggcgccgcggtggcggtctggaccacgccggagagcgtcgaagcgggggcggtgttcgccgagatcggcccgcgcatggccgagttgagcggttcccggctggccgcgcagcaacagatggaaggcctcctggcgccgcaccggcccaaggagcccgcgtggttcctggccaccgtcggcgtctcgcccgaccaccagggcaagggtctgggcagcgccgtcgtgctccccggagtggaggcggccgagcgcgccggggtgcccgccttcctggagacctccgcgccccgcaacctccccttctacgagcggctcggcttcaccgtcaccgccgacgtcgaggtgcccgaaggaccgcgcacctggtgcatgacccgcaagcccggtgcctga

SEQ ID NO: 8830 - DNA, 1791 bp, synthetic construct
  source 1..1791: mol_type = other DNA
atggccttaccagtgaccgccttgctcctgccgctggccttgctgctccacgccgccaggccggaggtgcagctggttgaatctggcggaggatctgttcaggctggcggctctctgagactgtcttgtgccgcctctggctacacctacggcatcaactgcatgggctggttcagacaggcccctggcaaagaacgagaaggcgtggccgccatctctaccggcggaggcagaaccgactaccgggattctgtgaagggcagattcaccatcagccaggacaacgccaagaacaccgtgtacctccagatgaacagcctgaagcctgaggacaccgccatgtactactgtgccggcaagaccacctatcctggctacggatgtggcctgggcagaagcgcctacaattattggggccagggcacccaagtgaccgtgtctagcacgcgtaccacgacgccagcgccgcgaccaccaacaccggcgcccaccatcgcgtcgcagcccctgtccctgcgcccagaggcgtgccggccagcggcggggggcgcagtgcacacgagggggctggacttcgcctgtgacatctacatctgggcgcccttggccgggacttgtggggtccttctcctgtcactggttatcaccctttactgcaaacggggcagaaagaaactcctgtatatattcaaacaaccatttatgagaccagtacaaactactcaagaggaagatggctgtagctgccgatttccagaagaagaagaaggaggatgtgaactgagagtgaagttcagcaggagcgcagacgcccccgcgtaccagcagggccagaaccagctctataacgagctgaatctaggacgaagagaggagtacgatgttttggacaagagacgtggccgggaccctgagatggggggaaagccgagaaggaagaaccctcaggaaggcctgtacaatgaactgcagaaagataagatggcggaggcctacagtgagattgggatgaaaggcgagcgccggaggggcaaggggcacgatggcctttaccagggtctcagtacagccaccaaggacacctacgacgcccttcacatgcaggccctgccccctcgctctagtggctccggcgagggcagaggaagtctactaacctgcggagatgtggaagaaaatcctggcccacatatgaccgagtacaagcccacggtgcgcctcgccacccgcgacgacgtccccagggccgtacgcaccctcgccgccgcgttcgccgactaccccgccacgcgccacaccgtcgatccggaccgccacatcgagcgggtcaccgagctgcaagaactcttcctcacgcgcgtcgggctcgacatcggcaaggtgtgggtcgcggacgacggcgccgcggtggcggtctggaccacgccggagagcgtcgaagcgggggcggtgttcgccgagatcggcccgcgcatggccgagttgagcggttcccggctggccgcgcagcaacagatggaaggcctcctggcgccgcaccggcccaaggagcccgcgtggttcctggccaccgtcggcgtctcgcccgaccaccagggcaagggtctgggcagcgccgtcgtgctccccggagtggaggcggccgagcgcgccggggtgcccgccttcctggagacctccgcgccccgcaacctccccttctacgagcggctcggcttcaccgtcaccgccgacgtcgaggtgcccgaaggaccgcgcacctggtgcatgacccgcaagcccggtgcctga

SEQ ID NO: 8831 - DNA, 1791 bp, synthetic construct
  source 1..1791: mol_type = other DNA
atggccttaccagtgaccgccttgctcctgccgctggccttgctgctccacgccgccaggccggaggtgcagctggttgaatctggcggaggatctgttcaggctggcggctctctgagactgtcttgtgccgcctctggctacacctacggcatcaactgcatgggctggttcagacaggcccctggcaaagaacgagaaggcgtggccgccatctctaccggcggaggcagaaccgactaccgggattctgtgagaggcagattcaccatcagccaggacaacgccaagaacaccgtgtacctccagatgaacagcctgaagcctgaggacaccgccatgtactactgtgccggcaagaccacctatcctggctacggatgtggcctgggcagaagcgcctacaattattggggccagggcacccaagtgaccgtgtctagcacgcgtaccacgacgccagcgccgcgaccaccaacaccggcgcccaccatcgcgtcgcagcccctgtccctgcgcccagaggcgtgccggccagcggcggggggcgcagtgcacacgagggggctggacttcgcctgtgacatctacatctgggcgcccttggccgggacttgtggggtccttctcctgtcactggttatcaccctttactgcaaacggggcagaaagaaactcctgtatatattcaaacaaccatttatgagaccagtacaaactactcaagaggaagatggctgtagctgccgatttccagaagaagaagaaggaggatgtgaactgagagtgaagttcagcaggagcgcagacgcccccgcgtaccagcagggccagaaccagctctataacgagctgaatctaggacgaagagaggagtacgatgttttggacaagagacgtggccgggaccctgagatggggggaaagccgagaaggaagaaccctcaggaaggcctgtacaatgaactgcagaaagataagatggcggaggcctacagtgagattgggatgaaaggcgagcgccggaggggcaaggggcacgatggcctttaccagggtctcagtacagccaccaaggacacctacgacgcccttcacatgcaggccctgccccctcgctctagtggctccggcgagggcagaggaagtctactaacctgcggagatgtggaagaaaatcctggcccacatatgaccgagtacaagcccacggtgcgcctcgccacccgcgacgacgtccccagggccgtacgcaccctcgccgccgcgttcgccgactaccccgccacgcgccacaccgtcgatccggaccgccacatcgagcgggtcaccgagctgcaagaactcttcctcacgcgcgtcgggctcgacatcggcaaggtgtgggtcgcggacgacggcgccgcggtggcggtctggaccacgccggagagcgtcgaagcgggggcggtgttcgccgagatcggcccgcgcatggccgagttgagcggttcccggctggccgcgcagcaacagatggaaggcctcctggcgccgcaccggcccaaggagcccgcgtggttcctggccaccgtcggcgtctcgcccgaccaccagggcaagggtctgggcagcgccgtcgtgctccccggagtggaggcggccgagcgcgccggggtgcccgccttcctggagacctccgcgccccgcaacctccccttctacgagcggctcggcttcaccgtcaccgccgacgtcgaggtgcccgaaggaccgcgcacctggtgcatgacccgcaagcccggtgcctga

SEQ ID NO: 8832 - DNA, 1803 bp, synthetic construct
  source 1..1803: mol_type = other DNA
atggccctgcctgtgacagctctgctgctgcctctggcactgctgctgcacgccgccagacctcaggttcagctggtggaaagcggtggtggcgttgtgcaacctggcagaagtctgaggctgagctgtgtggcctccggctacacatactctattaactgcatgggatggtttcggcaggctcccggaaaaggcagagagggaattgccgtgatctctacaggcggcggaacaacaggcgtggcagatagcgtgaaaggccggttcaccatctctcaggacaatgccaagaatacggtctatctccagatgaactctctgcgggccgaagatacagccatgtattactgcgccgccaggtccacctacagcggctatgcctgtgtgtacagcgaagtgaacggctacaactacagaggccagggaacacaagtcacagtcagcagcggtaccgaaacgcgtaccacgacgccagcgccgcgaccaccaacaccggcgcccaccatcgcgtcgcagcccctgtccctgcgcccagaggcgtgccggccagcggcggggggcgcagtgcacacgagggggctggacttcgcctgtgacatctacatctgggcgcccttggccgggacttgtggggtccttctcctgtcactggttatcaccctttactgcaaacggggcagaaagaaactcctgtatatattcaaacaaccatttatgagaccagtacaaactactcaagaggaagatggctgtagctgccgatttccagaagaagaagaaggaggatgtgaactgagagtgaagttcagcaggagcgcagacgcccccgcgtaccagcagggccagaaccagctctataacgagctgaatctaggacgaagagaggagtacgatgttttggacaagagacgtggccgggaccctgagatggggggaaagccgagaaggaagaaccctcaggaaggcctgtacaatgaactgcagaaagataagatggcggaggcctacagtgagattgggatgaaaggcgagcgccggaggggcaaggggcacgatggcctttaccagggtctcagtacagccaccaaggacacctacgacgcccttcacatgcaggccctgccccctcgctctagtggctccggcgagggcagaggaagtctactaacctgcggagatgtggaagaaaatcctggcccacatatgaccgagtacaagcccacggtgcgcctcgccacccgcgacgacgtccccagggccgtacgcaccctcgccgccgcgttcgccgactaccccgccacgcgccacaccgtcgatccggaccgccacatcgagcgggtcaccgagctgcaagaactcttcctcacgcgcgtcgggctcgacatcggcaaggtgtgggtcgcggacgacggcgccgcggtggcggtctggaccacgccggagagcgtcgaagcgggggcggtgttcgccgagatcggcccgcgcatggccgagttgagcggttcccggctggccgcgcagcaacagatggaaggcctcctggcgccgcaccggcccaaggagcccgcgtggttcctggccaccgtcggcgtctcgcccgaccaccagggcaagggtctgggcagcgccgtcgtgctccccggagtggaggcggccgagcgcgccggggtgcccgccttcctggagacctccgcgccccgcaacctccccttctacgagcggctcggcttcaccgtcaccgccgacgtcgaggtgcccgaaggaccgcgcacctggtgcatgacccgcaagcccggtgcctga

SEQ ID NO: 8833 - DNA, 1794 bp, synthetic construct
  source 1..1794: mol_type = other DNA
atggccctgcctgtgacagctctgctgctgcctctggcactgctgctgcacgccgccagacctcaagttcagctggtggaaagcggtggtggcgttgtgcaacctggtggaagtctgaggctgagctgtgccgcttctggcctgagctttagcacctacactgtggcctggttcaggcaggctcccggaaagggtcttgaaggcgtggccgccattccttacaccagccagcacatggtgtacacagacagcgtcagaggccggttcaccatcagcagagacaactccaagaatacgctctatctccagatgaactctctgcgcgccgaagatacagccgtgtattactgcgccaccgacagacggcctggcacctctatgctggctatcaacggctacaacagatggggacagggaaccaccgtgaccgtgtcatctggtaccgaaacgcgtaccacgacgccagcgccgcgaccaccaacaccggcgcccaccatcgcgtcgcagcccctgtccctgcgcccagaggcgtgccggccagcggcggggggcgcagtgcacacgagggggctggacttcgcctgtgacatctacatctgggcgcccttggccgggacttgtggggtccttctcctgtcactggttatcaccctttactgcaaacggggcagaaagaaactcctgtatatattcaaacaaccatttatgagaccagtacaaactactcaagaggaagatggctgtagctgccgatttccagaagaagaagaaggaggatgtgaactgagagtgaagttcagcaggagcgcagacgcccccgcgtaccagcagggccagaaccagctctataacgagctgaatctaggacgaagagaggagtacgatgttttggacaagagacgtggccgggaccctgagatggggggaaagccgagaaggaagaaccctcaggaaggcctgtacaatgaactgcagaaagataagatggcggaggcctacagtgagattgggatgaaaggcgagcgccggaggggcaaggggcacgatggcctttaccagggtctcagtacagccaccaaggacacctacgacgcccttcacatgcaggccctgccccctcgctctagtggctccggcgagggcagaggaagtctactaacctgcggagatgtggaagaaaatcctggcccacatatgaccgagtacaagcccacggtgcgcctcgccacccgcgacgacgtccccagggccgtacgcaccctcgccgccgcgttcgccgactaccccgccacgcgccacaccgtcgatccggaccgccacatcgagcgggtcaccgagctgcaagaactcttcctcacgcgcgtcgggctcgacatcggcaaggtgtgggtcgcggacgacggcgccgcggtggcggtctggaccacgccggagagcgtcgaagcgggggcggtgttcgccgagatcggcccgcgcatggccgagttgagcggttcccggctggccgcgcagcaacagatggaaggcctcctggcgccgcaccggcccaaggagcccgcgtggttcctggccaccgtcggcgtctcgcccgaccaccagggcaagggtctgggcagcgccgtcgtgctccccggagtggaggcggccgagcgcgccggggtgcccgccttcctggagacctccgcgccccgcaacctccccttctacgagcggctcggcttcaccgtcaccgccgacgtcgaggtgcccgaaggaccgcgcacctggtgcatgacccgcaagcccggtgcctga

SEQ ID NO: 8834 - DNA, 1794 bp, synthetic construct
  source 1..1794: mol_type = other DNA
atggccctgcctgtgacagctctgctgctgcctctggcactgctgctgcacgccgccagacctcaagttcagctggtggaaagcggtggtggcgttgtgcaacctggtggaagtctgaggctgagctgtgccgcttctggcctgagctttagcacctacactgtggcctggttcaggcaggctcccggaaagggtcttgaaggcgtggccgccattccttacaccagccagcacatggtgtacacagacagcgtcagaggccggttcaccatcagcagagacaactccaagaatacgctctatctccagatgaactctctgcgcgccgaagatacagccgtgtattactgcgccaccgacagacggcctggcacctctatgctggctgtgaacggctacaaccactggggacagggaaccaccgtgaccgtgtcatctggtaccgaaacgcgtaccacgacgccagcgccgcgaccaccaacaccggcgcccaccatcgcgtcgcagcccctgtccctgcgcccagaggcgtgccggccagcggcggggggcgcagtgcacacgagggggctggacttcgcctgtgacatctacatctgggcgcccttggccgggacttgtggggtccttctcctgtcactggttatcaccctttactgcaaacggggcagaaagaaactcctgtatatattcaaacaaccatttatgagaccagtacaaactactcaagaggaagatggctgtagctgccgatttccagaagaagaagaaggaggatgtgaactgagagtgaagttcagcaggagcgcagacgcccccgcgtaccagcagggccagaaccagctctataacgagctgaatctaggacgaagagaggagtacgatgttttggacaagagacgtggccgggaccctgagatggggggaaagccgagaaggaagaaccctcaggaaggcctgtacaatgaactgcagaaagataagatggcggaggcctacagtgagattgggatgaaaggcgagcgccggaggggcaaggggcacgatggcctttaccagggtctcagtacagccaccaaggacacctacgacgcccttcacatgcaggccctgccccctcgctctagtggctccggcgagggcagaggaagtctactaacctgcggagatgtggaagaaaatcctggcccacatatgaccgagtacaagcccacggtgcgcctcgccacccgcgacgacgtccccagggccgtacgcaccctcgccgccgcgttcgccgactaccccgccacgcgccacaccgtcgatccggaccgccacatcgagcgggtcaccgagctgcaagaactcttcctcacgcgcgtcgggctcgacatcggcaaggtgtgggtcgcggacgacggcgccgcggtggcggtctggaccacgccggagagcgtcgaagcgggggcggtgttcgccgagatcggcccgcgcatggccgagttgagcggttcccggctggccgcgcagcaacagatggaaggcctcctggcgccgcaccggcccaaggagcccgcgtggttcctggccaccgtcggcgtctcgcccgaccaccagggcaagggtctgggcagcgccgtcgtgctccccggagtggaggcggccgagcgcgccggggtgcccgccttcctggagacctccgcgccccgcaacctccccttctacgagcggctcggcttcaccgtcaccgccgacgtcgaggtgcccgaaggaccgcgcacctggtgcatgacccgcaagcccggtgcctga

SEQ ID NO: 8835 - DNA, 1794 bp, synthetic construct
  source 1..1794: mol_type = other DNA
atggccctgcctgtgacagctctgctgctgcctctggcactgctgctgcacgccgccagacctcaagttcagctggtggaaagcggtggtggcgttgtgcaacctggtggaagtctgaggctgagctgtgccgcttctggcctgagctttagcacctacactgtggcctggttcaggcaggctcccggaaagggtcttgaaggcgtggccgccattccttacaccagccagcacatggtgtacgccgacagcgtcaagggccggttcaccatcagcagagacaactccaagaatacgctctatctccagatgaactctctgcgcgccgaagatacagccgtgtattactgcgccaccgacagacggcctggcaccaccatgctggctatcaacggctacaaccactggggacagggaaccaccgtgaccgtgtcatctggtaccgaaacgcgtaccacgacgccagcgccgcgaccaccaacaccggcgcccaccatcgcgtcgcagcccctgtccctgcgcccagaggcgtgccggccagcggcggggggcgcagtgcacacgagggggctggacttcgcctgtgacatctacatctgggcgcccttggccgggacttgtggggtccttctcctgtcactggttatcaccctttactgcaaacggggcagaaagaaactcctgtatatattcaaacaaccatttatgagaccagtacaaactactcaagaggaagatggctgtagctgccgatttccagaagaagaagaaggaggatgtgaactgagagtgaagttcagcaggagcgcagacgcccccgcgtaccagcagggccagaaccagctctataacgagctgaatctaggacgaagagaggagtacgatgttttggacaagagacgtggccgggaccctgagatggggggaaagccgagaaggaagaaccctcaggaaggcctgtacaatgaactgcagaaagataagatggcggaggcctacagtgagattgggatgaaaggcgagcgccggaggggcaaggggcacgatggcctttaccagggtctcagtacagccaccaaggacacctacgacgcccttcacatgcaggccctgccccctcgctctagtggctccggcgagggcagaggaagtctactaacctgcggagatgtggaagaaaatcctggcccacatatgaccgagtacaagcccacggtgcgcctcgccacccgcgacgacgtccccagggccgtacgcaccctcgccgccgcgttcgccgactaccccgccacgcgccacaccgtcgatccggaccgccacatcgagcgggtcaccgagctgcaagaactcttcctcacgcgcgtcgggctcgacatcggcaaggtgtgggtcgcggacgacggcgccgcggtggcggtctggaccacgccggagagcgtcgaagcgggggcggtgttcgccgagatcggcccgcgcatggccgagttgagcggttcccggctggccgcgcagcaacagatggaaggcctcctggcgccgcaccggcccaaggagcccgcgtggttcctggccaccgtcggcgtctcgcccgaccaccagggcaagggtctgggcagcgccgtcgtgctccccggagtggaggcggccgagcgcgccggggtgcccgccttcctggagacctccgcgccccgcaacctccccttctacgagcggctcggcttcaccgtcaccgccgacgtcgaggtgcccgaaggaccgcgcacctggtgcatgacccgcaagcccggtgcctga

SEQ ID NO: 8836 - DNA, 1794 bp, synthetic construct
  source 1..1794: mol_type = other DNA
atggccctgcctgtgacagctctgctgctgcctctggcactgctgctgcacgccgccagacctcaagttcagctggtggaaagcggtggtggcgttgtgcaacctggtggaagtctgaggctgagctgtgccgcttctggcctgagctttagcacctacactgtggcctggttcaggcaggctcccggaaagggtcttgaaggcgtggccgccattccttacaccagccagcacatggtgtacgccgacagcgtcaagggccggttcaccatcagcagagacaactccaagaatacgctctatctccagatgaactctctgcgcgccgaagatacagccgtgtattactgcgccaccgacagacggcctggcacctctatgctggctgtgaacggctacaaccactggggacagggaaccaccgtgaccgtgtcatctggtaccgaaacgcgtaccacgacgccagcgccgcgaccaccaacaccggcgcccaccatcgcgtcgcagcccctgtccctgcgcccagaggcgtgccggccagcggcggggggcgcagtgcacacgagggggctggacttcgcctgtgacatctacatctgggcgcccttggccgggacttgtggggtccttctcctgtcactggttatcaccctttactgcaaacggggcagaaagaaactcctgtatatattcaaacaaccatttatgagaccagtacaaactactcaagaggaagatggctgtagctgccgatttccagaagaagaagaaggaggatgtgaactgagagtgaagttcagcaggagcgcagacgcccccgcgtaccagcagggccagaaccagctctataacgagctgaatctaggacgaagagaggagtacgatgttttggacaagagacgtggccgggaccctgagatggggggaaagccgagaaggaagaaccctcaggaaggcctgtacaatgaactgcagaaagataagatggcggaggcctacagtgagattgggatgaaaggcgagcgccggaggggcaaggggcacgatggcctttaccagggtctcagtacagccaccaaggacacctacgacgcccttcacatgcaggccctgccccctcgctctagtggctccggcgagggcagaggaagtctactaacctgcggagatgtggaagaaaatcctggcccacatatgaccgagtacaagcccacggtgcgcctcgccacccgcgacgacgtccccagggccgtacgcaccctcgccgccgcgttcgccgactaccccgccacgcgccacaccgtcgatccggaccgccacatcgagcgggtcaccgagctgcaagaactcttcctcacgcgcgtcgggctcgacatcggcaaggtgtgggtcgcggacgacggcgccgcggtggcggtctggaccacgccggagagcgtcgaagcgggggcggtgttcgccgagatcggcccgcgcatggccgagttgagcggttcccggctggccgcgcagcaacagatggaaggcctcctggcgccgcaccggcccaaggagcccgcgtggttcctggccaccgtcggcgtctcgcccgaccaccagggcaagggtctgggcagcgccgtcgtgctccccggagtggaggcggccgagcgcgccggggtgcccgccttcctggagacctccgcgccccgcaacctccccttctacgagcggctcggcttcaccgtcaccgccgacgtcgaggtgcccgaaggaccgcgcacctggtgcatgacccgcaagcccggtgcctga

SEQ ID NO: 8837 - DNA, 1794 bp, synthetic construct
  source 1..1794: mol_type = other DNA
atggccctgcctgtgacagctctgctgctgcctctggcactgctgctgcacgccgccagacctcaagttcagctggtggaaagcggtggtggcgttgtgcaacctggtggaagtctgaggctgagctgtgccgcttctggcctgagctttagcacctacactgtggcctggttcaggcaggctcccggaaagggtcttgaaggcgtggccgccattccttacaccagccagcacatggtgtacgccgacagcgtcaagggccggttcaccatcagcagagacaactccaagaatacgctctatctccagatgaactctctgcgcgccgaagatacagccgtgtattactgcgccaccgacagacggcctggcaccaccatgctggctgtgaacggctacaaccactggggacagggaaccaccgtgaccgtgtcatctggtaccgaaacgcgtaccacgacgccagcgccgcgaccaccaacaccggcgcccaccatcgcgtcgcagcccctgtccctgcgcccagaggcgtgccggccagcggcggggggcgcagtgcacacgagggggctggacttcgcctgtgacatctacatctgggcgcccttggccgggacttgtggggtccttctcctgtcactggttatcaccctttactgcaaacggggcagaaagaaactcctgtatatattcaaacaaccatttatgagaccagtacaaactactcaagaggaagatggctgtagctgccgatttccagaagaagaagaaggaggatgtgaactgagagtgaagttcagcaggagcgcagacgcccccgcgtaccagcagggccagaaccagctctataacgagctgaatctaggacgaagagaggagtacgatgttttggacaagagacgtggccgggaccctgagatggggggaaagccgagaaggaagaaccctcaggaaggcctgtacaatgaactgcagaaagataagatggcggaggcctacagtgagattgggatgaaaggcgagcgccggaggggcaaggggcacgatggcctttaccagggtctcagtacagccaccaaggacacctacgacgcccttcacatgcaggccctgccccctcgctctagtggctccggcgagggcagaggaagtctactaacctgcggagatgtggaagaaaatcctggcccacatatgaccgagtacaagcccacggtgcgcctcgccacccgcgacgacgtccccagggccgtacgcaccctcgccgccgcgttcgccgactaccccgccacgcgccacaccgtcgatccggaccgccacatcgagcgggtcaccgagctgcaagaactcttcctcacgcgcgtcgggctcgacatcggcaaggtgtgggtcgcggacgacggcgccgcggtggcggtctggaccacgccggagagcgtcgaagcgggggcggtgttcgccgagatcggcccgcgcatggccgagttgagcggttcccggctggccgcgcagcaacagatggaaggcctcctggcgccgcaccggcccaaggagcccgcgtggttcctggccaccgtcggcgtctcgcccgaccaccagggcaagggtctgggcagcgccgtcgtgctccccggagtggaggcggccgagcgcgccggggtgcccgccttcctggagacctccgcgccccgcaacctccccttctacgagcggctcggcttcaccgtcaccgccgacgtcgaggtgcccgaaggaccgcgcacctggtgcatgacccgcaagcccggtgcctga

SEQ ID NO: 8838 - DNA, 1785 bp, synthetic construct
  source 1..1785: mol_type = other DNA
atggccttaccagtgaccgccttgctcctgccgctggccttgctgctccacgccgccaggccgcaagttcagctggtggaaagcggtggtggcgttgtgcaacctggtagaagtctgaggcttagctgcgccgccagcttttctggatacggcgtgtcaacaatgggatggtttaggcaggctccaggcaagggccttgaaggcgtggccgctatcacagtcggctccggcaatacctactacgccgatagcgtgagaggcaggttcacaatctccagagacaacagcaagaatacggtgtacctgcaaatgaacagcctccgcgccgaggatacagccatgtattactgtgccgtgggctacctgtctggcggctcttgggatgtgcccggcagatacaattactggggacagggaaccctggttaccgtgtctagtacgcgtaccacgacgccagcgccgcgaccaccaacaccggcgcccaccatcgcgtcgcagcccctgtccctgcgcccagaggcgtgccggccagcggcggggggcgcagtgcacacgagggggctggacttcgcctgtgacatctacatctgggcgcccttggccgggacttgtggggtccttctcctgtcactggttatcaccctttactgcaaacggggcagaaagaaactcctgtatatattcaaacaaccatttatgagaccagtacaaactactcaagaggaagatggctgtagctgccgatttccagaagaagaagaaggaggatgtgaactgagagtgaagttcagcaggagcgcagacgcccccgcgtaccagcagggccagaaccagctctataacgagctgaatctaggacgaagagaggagtacgatgttttggacaagagacgtggccgggaccctgagatggggggaaagccgagaaggaagaaccctcaggaaggcctgtacaatgaactgcagaaagataagatggcggaggcctacagtgagattgggatgaaaggcgagcgccggaggggcaaggggcacgatggcctttaccagggtctcagtacagccaccaaggacacctacgacgcccttcacatgcaggccctgccccctcgctctagtggctccggcgagggcagaggaagtctactaacctgcggagatgtggaagaaaatcctggcccacatatgaccgagtacaagcccacggtgcgcctcgccacccgcgacgacgtccccagggccgtacgcaccctcgccgccgcgttcgccgactaccccgccacgcgccacaccgtcgatccggaccgccacatcgagcgggtcaccgagctgcaagaactcttcctcacgcgcgtcgggctcgacatcggcaaggtgtgggtcgcggacgacggcgccgcggtggcggtctggaccacgccggagagcgtcgaagcgggggcggtgttcgccgagatcggcccgcgcatggccgagttgagcggttcccggctggccgcgcagcaacagatggaaggcctcctggcgccgcaccggcccaaggagcccgcgtggttcctggccaccgtcggcgtctcgcccgaccaccagggcaagggtctgggcagcgccgtcgtgctccccggagtggaggcggccgagcgcgccggggtgcccgccttcctggagacctccgcgccccgcaacctccccttctacgagcggctcggcttcaccgtcaccgccgacgtcgaggtgcccgaaggaccgcgcacctggtgcatgacccgcaagcccggtgcctga

SEQ ID NO: 8839 - DNA, 1785 bp, synthetic construct
  source 1..1785: mol_type = other DNA
atggccttaccagtgaccgccttgctcctgccgctggccttgctgctccacgccgccaggccgcaagttcagctggtggaaagcggtggtggcgttgtgcaacctggtagaagtctgaggcttagctgcgccgccagcttttctggatacggcgtgtcaacaatgggatggtttaggcaggctccaggcaagggccttgaaggcgtggccgtgatcacagtcggctccggcaatacctactacgccgatagcgtgagaggcaggttcacaatctccagagacaacagcaagaatacggtgtacctgcaaatgaacagcctccgcgccgaggatacagccatgtattactgtgccgtgggctacctgtctggcggctcttgggatgtgcccggcagatacaattactggggacagggaaccctggttaccgtgtctagtacgcgtaccacgacgccagcgccgcgaccaccaacaccggcgcccaccatcgcgtcgcagcccctgtccctgcgcccagaggcgtgccggccagcggcggggggcgcagtgcacacgagggggctggacttcgcctgtgacatctacatctgggcgcccttggccgggacttgtggggtccttctcctgtcactggttatcaccctttactgcaaacggggcagaaagaaactcctgtatatattcaaacaaccatttatgagaccagtacaaactactcaagaggaagatggctgtagctgccgatttccagaagaagaagaaggaggatgtgaactgagagtgaagttcagcaggagcgcagacgcccccgcgtaccagcagggccagaaccagctctataacgagctgaatctaggacgaagagaggagtacgatgttttggacaagagacgtggccgggaccctgagatggggggaaagccgagaaggaagaaccctcaggaaggcctgtacaatgaactgcagaaagataagatggcggaggcctacagtgagattgggatgaaaggcgagcgccggaggggcaaggggcacgatggcctttaccagggtctcagtacagccaccaaggacacctacgacgcccttcacatgcaggccctgccccctcgctctagtggctccggcgagggcagaggaagtctactaacctgcggagatgtggaagaaaatcctggcccacatatgaccgagtacaagcccacggtgcgcctcgccacccgcgacgacgtccccagggccgtacgcaccctcgccgccgcgttcgccgactaccccgccacgcgccacaccgtcgatccggaccgccacatcgagcgggtcaccgagctgcaagaactcttcctcacgcgcgtcgggctcgacatcggcaaggtgtgggtcgcggacgacggcgccgcggtggcggtctggaccacgccggagagcgtcgaagcgggggcggtgttcgccgagatcggcccgcgcatggccgagttgagcggttcccggctggccgcgcagcaacagatggaaggcctcctggcgccgcaccggcccaaggagcccgcgtggttcctggccaccgtcggcgtctcgcccgaccaccagggcaagggtctgggcagcgccgtcgtgctccccggagtggaggcggccgagcgcgccggggtgcccgccttcctggagacctccgcgccccgcaacctccccttctacgagcggctcggcttcaccgtcaccgccgacgtcgaggtgcccgaaggaccgcgcacctggtgcatgacccgcaagcccggtgcctga

SEQ ID NO: 8840 - DNA, 1785 bp, synthetic construct
  source 1..1785: mol_type = other DNA
atggccttaccagtgaccgccttgctcctgccgctggccttgctgctccacgccgccaggccgcaagttcagctggtggaaagcggtggtggcgttgtgcaacctggtagaagtctgaggcttagctgcgccgccagcttttctggatacggcgtgtcaacaatgggatggtttaggcaggctccaggcaagggccttgaaggcgtggccgtgatcacagtcggctccggcaatacctactacaccgatagcgtgagaggcaggttcacaatctccagagacaacagcaagaatacggtgtacctgcaaatgaacagcctccgcgccgaggatacagccatgtattactgtgccgtgggctacctgtctggcggctcttgggatgtgcccggcagatacaattactggggacagggaaccctggttaccgtgtctagtacgcgtaccacgacgccagcgccgcgaccaccaacaccggcgcccaccatcgcgtcgcagcccctgtccctgcgcccagaggcgtgccggccagcggcggggggcgcagtgcacacgagggggctggacttcgcctgtgacatctacatctgggcgcccttggccgggacttgtggggtccttctcctgtcactggttatcaccctttactgcaaacggggcagaaagaaactcctgtatatattcaaacaaccatttatgagaccagtacaaactactcaagaggaagatggctgtagctgccgatttccagaagaagaagaaggaggatgtgaactgagagtgaagttcagcaggagcgcagacgcccccgcgtaccagcagggccagaaccagctctataacgagctgaatctaggacgaagagaggagtacgatgttttggacaagagacgtggccgggaccctgagatggggggaaagccgagaaggaagaaccctcaggaaggcctgtacaatgaactgcagaaagataagatggcggaggcctacagtgagattgggatgaaaggcgagcgccggaggggcaaggggcacgatggcctttaccagggtctcagtacagccaccaaggacacctacgacgcccttcacatgcaggccctgccccctcgctctagtggctccggcgagggcagaggaagtctactaacctgcggagatgtggaagaaaatcctggcccacatatgaccgagtacaagcccacggtgcgcctcgccacccgcgacgacgtccccagggccgtacgcaccctcgccgccgcgttcgccgactaccccgccacgcgccacaccgtcgatccggaccgccacatcgagcgggtcaccgagctgcaagaactcttcctcacgcgcgtcgggctcgacatcggcaaggtgtgggtcgcggacgacggcgccgcggtggcggtctggaccacgccggagagcgtcgaagcgggggcggtgttcgccgagatcggcccgcgcatggccgagttgagcggttcccggctggccgcgcagcaacagatggaaggcctcctggcgccgcaccggcccaaggagcccgcgtggttcctggccaccgtcggcgtctcgcccgaccaccagggcaagggtctgggcagcgccgtcgtgctccccggagtggaggcggccgagcgcgccggggtgcccgccttcctggagacctccgcgccccgcaacctccccttctacgagcggctcggcttcaccgtcaccgccgacgtcgaggtgcccgaaggaccgcgcacctggtgcatgacccgcaagcccggtgcctga

SEQ ID NO: 8841 - DNA, 2178 bp, synthetic construct
  source 1..2178: mol_type = other DNA
atggccttaccagtgaccgccttgctcctgccgctggccttgctgctccacgccgccaggccgcaggttcagctccagcagtctggacctggcctggtcaagcctagccagacactgtctctgacctgtgccatcagcggcgatagcgtgtcctctaatagcgccgcctggaactggatcagacagagccctagcagaggactcgaatggctgggcagaacctactacaagagcaagtggtacaacgactacgccgtgtctctgcggagccggatcaccatcaatcccgtgaccagcaagaaccaggtggccctgcacatgaacagcgtgacccctgaagataccgccgtgtactactgtgccagagccggaattgtggtggtgcccggacctgacacatactactactacgaccacggcctggacgtgtggggccagggaacaacagtgactgtctcttctggaggcggtggatctggcggcggaggtagtggtggtggcggatctgacatccagatgacacagagcccctctagcctgtctgccagcgtgggagacagagtgaccatcacctgtagagccagccagagcatcagcagctacctgaactggtatcagcaaaagcccggcaaggcccctgagctgctgattcatgctgcaagcagcctccagagcggcgtgccaagcagattttctggcagcggcagcggaaccgacttcaccctgacaatatctagcctccagcctgaggacttcgccacctactactgccagcagagctacagcacccctcctatcacctttggacagggcaccagactggaaatcaagacgcgtaccacgacgccagcgccgcgaccaccaacaccggcgcccaccatcgcgtcgcagcccctgtccctgcgcccagaggcgtgccggccagcggcggggggcgcagtgcacacgagggggctggacttcgcctgtgacatctacatctgggcgcccttggccgggacttgtggggtccttctcctgtcactggttatcaccctttactgcaaacggggcagaaagaaactcctgtatatattcaaacaaccatttatgagaccagtacaaactactcaagaggaagatggctgtagctgccgatttccagaagaagaagaaggaggatgtgaactgagagtgaagttcagcaggagcgcagacgcccccgcgtaccagcagggccagaaccagctctataacgagctgaatctaggacgaagagaggagtacgatgttttggacaagagacgtggccgggaccctgagatggggggaaagccgagaaggaagaaccctcaggaaggcctgtacaatgaactgcagaaagataagatggcggaggcctacagtgagattgggatgaaaggcgagcgccggaggggcaaggggcacgatggcctttaccagggtctcagtacagccaccaaggacacctacgacgcccttcacatgcaggccctgccccctcgctctagtggctccggcgagggcagaggaagtctactaacctgcggagatgtggaagaaaatcctggcccacatatgaccgagtacaagcccacggtgcgcctcgccacccgcgacgacgtccccagggccgtacgcaccctcgccgccgcgttcgccgactaccccgccacgcgccacaccgtcgatccggaccgccacatcgagcgggtcaccgagctgcaagaactcttcctcacgcgcgtcgggctcgacatcggcaaggtgtgggtcgcggacgacggcgccgcggtggcggtctggaccacgccggagagcgtcgaagcgggggcggtgttcgccgagatcggcccgcgcatggccgagttgagcggttcccggctggccgcgcagcaacagatggaaggcctcctggcgccgcaccggcccaaggagcccgcgtggttcctggccaccgtcggcgtctcgcccgaccaccagggcaagggtctgggcagcgccgtcgtgctccccggagtggaggcggccgagcgcgccggggtgcccgccttcctggagacctccgcgccccgcaacctccccttctacgagcggctcggcttcaccgtcaccgccgacgtcgaggtgcccgaaggaccgcgcacctggtgcatgacccgcaagcccggtgcctga

SEQ ID NO: 8842 - DNA, 2127 bp, synthetic construct
  source 1..2127: mol_type = other DNA
atggccttaccagtgaccgccttgctcctgccgctggccttgctgctccacgccgccaggccgcagatcgtgctgacacagagccccgccatcatgtctgttagccctggcgagaaagtgaccatgacctgtagcgccagcagcagcgtgaactacctgcactggttccagcagaagcccggcacaagccctaagctgtggctgtacagcaccagcaatctggcctctggcgtgccagccagattttctggctctggcagcggcaccagctacagcctgacaatcagcagcatggaagccgaggatgccgccacctactattgtcagcagcggagcatctacccaccttggacatttggcggaggcaccaagctggaaatcaaaggcggaggcggaagtggaggcggaggatctggcggcggaggctctgaagttcagctccagcagagcggccctgagcttgtgaaacctggcgcttccatgaagatcagctgcaaggccagcggcttcagcttcaccggctacaccatgaactgggtcaagcagtcccacggcaagaacctggaatggatcggcctgattagcccctacaacggcggcacctcctacaaccagaagttcaagggcaaggccacactgaccgtggacaagagcagcagcacagcctacatggagctgctgtccctgaccagcgaggacagcgccgtgtactactgcgccagagattacggctacgtgctggactattggggccagggcacaaccctgacagtgtctagtacgcgtaccacgacgccagcgccgcgaccaccaacaccggcgcccaccatcgcgtcgcagcccctgtccctgcgcccagaggcgtgccggccagcggcggggggcgcagtgcacacgagggggctggacttcgcctgtgacatctacatctgggcgcccttggccgggacttgtggggtccttctcctgtcactggttatcaccctttactgcaaacggggcagaaagaaactcctgtatatattcaaacaaccatttatgagaccagtacaaactactcaagaggaagatggctgtagctgccgatttccagaagaagaagaaggaggatgtgaactgagagtgaagttcagcaggagcgcagacgcccccgcgtaccagcagggccagaaccagctctataacgagctgaatctaggacgaagagaggagtacgatgttttggacaagagacgtggccgggaccctgagatggggggaaagccgagaaggaagaaccctcaggaaggcctgtacaatgaactgcagaaagataagatggcggaggcctacagtgagattgggatgaaaggcgagcgccggaggggcaaggggcacgatggcctttaccagggtctcagtacagccaccaaggacacctacgacgcccttcacatgcaggccctgccccctcgctctagtggctccggcgagggcagaggaagtctactaacctgcggagatgtggaagaaaatcctggcccacatatgaccgagtacaagcccacggtgcgcctcgccacccgcgacgacgtccccagggccgtacgcaccctcgccgccgcgttcgccgactaccccgccacgcgccacaccgtcgatccggaccgccacatcgagcgggtcaccgagctgcaagaactcttcctcacgcgcgtcgggctcgacatcggcaaggtgtgggtcgcggacgacggcgccgcggtggcggtctggaccacgccggagagcgtcgaagcgggggcggtgttcgccgagatcggcccgcgcatggccgagttgagcggttcccggctggccgcgcagcaacagatggaaggcctcctggcgccgcaccggcccaaggagcccgcgtggttcctggccaccgtcggcgtctcgcccgaccaccagggcaagggtctgggcagcgccgtcgtgctccccggagtggaggcggccgagcgcgccggggtgcccgccttcctggagacctccgcgccccgcaacctccccttctacgagcggctcggcttcaccgtcaccgccgacgtcgaggtgcccgaaggaccgcgcacctggtgcatgacccgcaagcccggtgcctga

SEQ ID NO: 8843 - DNA, 2127 bp, synthetic construct
  source 1..2127: mol_type = other DNA
atggccttaccagtgaccgccttgctcctgccgctggccttgctgctccacgccgccaggccgcagatcgtgctgacacagagccccagcatcatgtctgttagccctggcgagaaagtgaccatgacctgtagcgccaccagcagcgtgagctacctgcactggttccagcagaagcccggcacaagccctaagctgtggctgtacagcaccagcaatctggcctctggcgtgccagccagattttctggctctggcagcggcaccagctacagcctgacaatcagccgggtggccgccgaggatgccgccacctactattgtcagcagcggagcaactacccaccttggacatttggcggaggcaccaagctggaaatcaaaggcggaggcggaagtggaggcggaggatctggcggcggaggctctgaagttcagctccagcagagcggccctgagcttgtgaaacctggcgcttccgtgaagatcagctgcaaggccagcggctacagcttcaccggctacaccatgaactgggtcaagcagtcccacggcaagaacctggaatggatcggcctgattaacccctacaacggcggcacctcctacaaccagaagttcaaggccaaggccacactgaccgtggacaagagcagcagcacagcctacatgcagctgaagtccctgaccagcgaggacagcgccgtgtactactgcgccagagattacggctacgtgctggactattggggccagggcacaagcgtgacagtgtctagtacgcgtaccacgacgccagcgccgcgaccaccaacaccggcgcccaccatcgcgtcgcagcccctgtccctgcgcccagaggcgtgccggccagcggcggggggcgcagtgcacacgagggggctggacttcgcctgtgacatctacatctgggcgcccttggccgggacttgtggggtccttctcctgtcactggttatcaccctttactgcaaacggggcagaaagaaactcctgtatatattcaaacaaccatttatgagaccagtacaaactactcaagaggaagatggctgtagctgccgatttccagaagaagaagaaggaggatgtgaactgagagtgaagttcagcaggagcgcagacgcccccgcgtaccagcagggccagaaccagctctataacgagctgaatctaggacgaagagaggagtacgatgttttggacaagagacgtggccgggaccctgagatggggggaaagccgagaaggaagaaccctcaggaaggcctgtacaatgaactgcagaaagataagatggcggaggcctacagtgagattgggatgaaaggcgagcgccggaggggcaaggggcacgatggcctttaccagggtctcagtacagccaccaaggacacctacgacgcccttcacatgcaggccctgccccctcgctctagtggctccggcgagggcagaggaagtctactaacctgcggagatgtggaagaaaatcctggcccacatatgaccgagtacaagcccacggtgcgcctcgccacccgcgacgacgtccccagggccgtacgcaccctcgccgccgcgttcgccgactaccccgccacgcgccacaccgtcgatccggaccgccacatcgagcgggtcaccgagctgcaagaactcttcctcacgcgcgtcgggctcgacatcggcaaggtgtgggtcgcggacgacggcgccgcggtggcggtctggaccacgccggagagcgtcgaagcgggggcggtgttcgccgagatcggcccgcgcatggccgagttgagcggttcccggctggccgcgcagcaacagatggaaggcctcctggcgccgcaccggcccaaggagcccgcgtggttcctggccaccgtcggcgtctcgcccgaccaccagggcaagggtctgggcagcgccgtcgtgctccccggagtggaggcggccgagcgcgccggggtgcccgccttcctggagacctccgcgccccgcaacctccccttctacgagcggctcggcttcaccgtcaccgccgacgtcgaggtgcccgaaggaccgcgcacctggtgcatgacccgcaagcccggtgcctga

SEQ ID NO: 8844 - DNA, 1869 bp, synthetic construct; identical to SEQ ID NO: 5039
  source 1..1869: mol_type = other DNA

SEQ ID NO: 8845 - DNA, 2283 bp, synthetic construct; identical to SEQ ID NO: 5014
  source 1..2283: mol_type = other DNA

SEQ ID NO: 8846 - DNA, 2283 bp, synthetic construct; identical to SEQ ID NO: 5015
  source 1..2283: mol_type = other DNA

SEQ ID NO: 8847 - DNA, 2277 bp, synthetic construct; identical to SEQ ID NO: 4965
  source 1..2277: mol_type = other DNA

SEQ ID NO: 8848 - DNA, 2283 bp, synthetic construct; identical to SEQ ID NO: 5017
  source 1..2283: mol_type = other DNA

SEQ ID NO: 8849 - DNA, 2277 bp, synthetic construct; identical to SEQ ID NO: 5018
  source 1..2277: mol_type = other DNA

SEQ ID NO: 8850 - DNA, 2259 bp, synthetic construct; identical to SEQ ID NO: 5019
  source 1..2259: mol_type = other DNA

SEQ ID NO: 8851 - DNA, 2259 bp, synthetic construct; identical to SEQ ID NO: 5020
  source 1..2259: mol_type = other DNA

SEQ ID NO: 8852 - DNA, 2271 bp, synthetic construct; identical to SEQ ID NO: 5021
  source 1..2271: mol_type = other DNA

SEQ ID NO: 8853 - DNA, 1866 bp, synthetic construct; identical to SEQ ID NO: 5011
  source 1..1866: mol_type = other DNA

SEQ ID NO: 8854 - DNA, 2295 bp, synthetic construct; identical to SEQ ID NO: 5012
  source 1..2295: mol_type = other DNA

SEQ ID NO: 8855 - DNA, 2289 bp, synthetic construct; identical to SEQ ID NO: 4900
  source 1..2289: mol_type = other DNA

SEQ ID NO: 8856 - DNA, 2631 bp, synthetic construct; identical to SEQ ID NO: 5008
  source 1..2631: mol_type = other DNA

SEQ ID NO: 8857 - DNA, 2319 bp, synthetic construct
  source 1..2319: mol_type = other DNA
atggccttaccagtgaccgccttgctcctgccgctggccttgctgctccacgccgccaggccggacatccagatgacacagagccctagcagcctgtctgccagcgtgggagacagagtgaccatcacatgcaaggccagcgaccacatcaacaactggctggcctggtatcagcagaagcctggcaaggcccctaagctgctgatctacggcgctaccacactggaaacaggcgtgcccagcagattttctggcagcggctctggcaccgacttcaccctgacaatatccagcctccagcctgaggacttcgccacctactactgtcagcagagctggaacaccccttggacattcggccagggcaccaaggtggaaatcaagagactcgaggacctgaagaacgtgttcccacctgaggtggccgtgttcgagcctagcgaggccgagatcagccacacccagaaagccaccctcgtgtgcctggctaccggcttctaccccgaccatgtggaactgtcttggtgggtcaacggcaaagaggtgcacagcggcgtgtgtaccgacccccagccactgaaagaacagcccgccctgaacgacagccggtactgcctgagcagcagactgagagtgtccgccaccttctggcagaacccccggaaccacttcagatgccaggtgcagttctacggcctgagcgagaacgacgagtggacccaggacagagccaagcccgtgacccagatcgtgtctgccgaagcctggggcagagccgattgcggctttaccagcgagagctaccagcagggcgtgctgagcgccaccatcctgtacgagatcctgctgggcaaggccaccctgtacgccgtgctggtgtctgccctggtgctgatggctatggtcaagcggaaggacagccggggaagggccaagcgatctggatctggagcaacaaacttctcactactcaaacaagcaggtgacgtggaggagaatcccgggcctactagtgccaccatggactggatttggcgcatccttttccttgtcggcgctgctaccggcgcccattccgggccccagctccagctgcaagagtctggacctggcctggtcaagcctagcgagacactgagcctgacctgtaccgtgtccggcgatagcatcagcagcggcgattactactggggctggatcagacagcctcctggcaaaggactggaatggatcggccacatctactacagcggcatcagctactacaaccccagcctgaagtccagagtgaccatcagcgtggacaccagccggaaccagttctccctgaagctgtctagcgtgacagccgccgataccgccgtgtactactgcaccagagaggacagcagcaactggcggagtagaggccagggaacactggtcacagttagctctggatccgcacgcagcgaggacaggtataggaaccccaaaggaagatccgcacgcagcgaggacaggtataggaaccccaaaggaagtttcgaagttcagctggttgaatctggcggcggactggttcaacctggcggatctctgagactgagctgtgccgcctctggctacgcctttagcagctactgggtcaactgggttcgacaggcccctggcaaaggactggaatgggtcgcccaaatctatcccggcgacggcgacaccaactacaacggcaagttcaagggcagattcaccatcagccgggacaacagcaagaacaccctgtacctccagatgaactccctgagagccgaggacaccgccgtgtactattgtgccagatccatcaccaccgtcgtgggctgcgctatggattattggggccagggaaccctggtcaccgtgtcctctacgcgtatccagaaccctgatcctgccgtgtaccagctgcgggatagcaagagcagcgacaagagcgtgtgtctgttcaccgacttcgacagccagaccaacgtgtcccagagcaaggactccgacgtgtacatcaccgataagtgcgtgctggacatgcggagcatggacttcaagagcaactccgccgtggcctggtccaacaagtccgatttcgcctgcgccaacgccttcaacaacagcattatccccgaggacacattcttcccaagccccgagagcagctgcgacgtgaagctggtggaaaagagcttcgagacagacaccaacctgaacttccagaacctgagcgtgatcggcttcagaatcctgctgctgaaagtggccggctttaacctgctgatgaccctgcggctgtggtccagctaa

SEQ ID NO: 8858 - DNA, 2319 bp, synthetic construct
  source 1..2319: mol_type = other DNA
atggccttaccagtgaccgccttgctcctgccgctggccttgctgctccacgccgccaggccggacatccagatgacacagagccctagcagcctgtctgccagcgtgggagacagagtgaccatcacatgcaaggccagcgaccacatcaacaactggctggcctggtatcagcagaagcctggcaaggcccctaagctgctgatctacggcgctaccacactggaaacaggcgtgcccagcagattttctggcagcggctctggcaccgacttcaccctgacaatatccagcctccagcctgaggacttcgccacctactactgtcagcagagctggaacaccccttggacattcggccagggcaccaaggtggaaatcaagagactcgaggacctgaagaacgtgttcccacctgaggtggccgtgttcgagcctagcgaggccgagatcagccacacccagaaagccaccctcgtgtgcctggctaccggcttctaccccgaccatgtggaactgtcttggtgggtcaacggcaaagaggtgcacagcggcgtgtgtaccgacccccagccactgaaagaacagcccgccctgaacgacagccggtactgcctgagcagcagactgagagtgtccgccaccttctggcagaacccccggaaccacttcagatgccaggtgcagttctacggcctgagcgagaacgacgagtggacccaggacagagccaagcccgtgacccagatcgtgtctgccgaagcctggggcagagccgattgcggctttaccagcgagagctaccagcagggcgtgctgagcgccaccatcctgtacgagatcctgctgggcaaggccaccctgtacgccgtgctggtgtctgccctggtgctgatggctatggtcaagcggaaggacagccggggaagggccaagcgatctggatctggagcaacaaacttctcactactcaaacaagcaggtgacgtggaggagaatcccgggcctactagtgccaccatggactggatttggcgcatccttttccttgtcggcgctgctaccggcgcccattccgggccccagctccagctgcaagagtctggacctggcctggtcaagcctagcgagacactgagcctgacctgtaccgtgtccggcgatagcatcagcagcggcgattactactggggctggatcagacagcctcctggcaaaggactggaatggatcggccacatctactacagcggcgtgacctactacaaccccagcctgaagtccagagtgaccatcagcgtggacaccagccggaaccagttctccctgaagctgtctagcgtgacagccgccgataccgccgtgtactactgcaccagagaggacagcagcaactggcggagtagaggccagggaacactggtcacagttagctctggatccgcacgcagcgaggacaggtataggaaccccaaaggaagatccgcacgcagcgaggacaggtataggaaccccaaaggaagtttcgaagttcagctggttgaatctggcggcggactggttcaacctggcggatctctgagactgagctgtgccgcctctggctacgcctttagcagctactgggtcaactgggttcgacaggcccctggcaaaggactggaatgggtcgcccaaatctatcccggcgacggcgacaccaactacaacggcaagttcaagggcagattcaccatcagccgggacaacagcaagaacaccctgtacctccagatgaactccctgagagccgaggacaccgccgtgtactattgtgccagatccatcaccaccgtcgtgggctgcgctatggattattggggccagggaaccctggtcaccgtgtcctctacgcgtatccagaaccctgatcctgccgtgtaccagctgcgggatagcaagagcagcgacaagagcgtgtgtctgttcaccgacttcgacagccagaccaacgtgtcccagagcaaggactccgacgtgtacatcaccgataagtgcgtgctggacatgcggagcatggacttcaagagcaactccgccgtggcctggtccaacaagtccgatttcgcctgcgccaacgccttcaacaacagcattatccccgaggacacattcttcccaagccccgagagcagctgcgacgtgaagctggtggaaaagagcttcgagacagacaccaacctgaacttccagaacctgagcgtgatcggcttcagaatcctgctgctgaaagtggccggctttaacctgctgatgaccctgcggctgtggtccagctaa

SEQ ID NO: 8859 - DNA, 2322 bp, synthetic construct
  source 1..2322: mol_type = other DNA
atggccttaccagtgaccgccttgctcctgccgctggccttgctgctccacgccgccaggccggacatccagatgacacagagccctagcagcctgtctgccagcgtgggagacagagtgaccatcacatgcaaggccagcgaccacatcaacaactggctggcctggtatcagcagaagcctggcaaggcccctaagctgctgatctacggcgctaccacactggaaacaggcgtgcccagcagattttctggcagcggctctggcaccgacttcaccctgacaatatccagcctccagcctgaggacttcgccacctactactgtcagcagagctggaacaccccttggacattcggccagggcaccaaggtggaaatcaagagactcgaggacctgaagaacgtgttcccacctgaggtggccgtgttcgagcctagcgaggccgagatcagccacacccagaaagccaccctcgtgtgcctggctaccggcttctaccccgaccatgtggaactgtcttggtgggtcaacggcaaagaggtgcacagcggcgtgtgtaccgacccccagccactgaaagaacagcccgccctgaacgacagccggtactgcctgagcagcagactgagagtgtccgccaccttctggcagaacccccggaaccacttcagatgccaggtgcagttctacggcctgagcgagaacgacgagtggacccaggacagagccaagcccgtgacccagatcgtgtctgccgaagcctggggcagagccgattgcggctttaccagcgagagctaccagcagggcgtgctgagcgccaccatcctgtacgagatcctgctgggcaaggccaccctgtacgccgtgctggtgtctgccctggtgctgatggctatggtcaagcggaaggacagccggggaagggccaagcgatctggatctggagcaacaaacttctcactactcaaacaagcaggtgacgtggaggagaatcccgggcctactagtgccaccatggactggatttggcgcatccttttccttgtcggcgctgctaccggcgcccattccgggcccgaagtgcagctgcttgaaagtggcggcggactgattcagcctggcggatctctgagactgagctgtgccgccagcggcttcaccttttctagctacgccatgacctgggtccgacaggcacctggaaaagggcttgaatgggtgtccgccatcagcggctctggcgattacacacactacgccgacagcgtgaagggcagattcaccatcagcagagacaacagcaagaacaccgtgtacctccagatgaacagcctgagagccgaggacagcgccgtgtattattgcgccaaggatgaggatggcggcagcctgcttggacacagaggacaaggcaccctggtcaccgtttcttccggatccgcacgcagcgaggacaggtataggaaccccaaaggaagatccgcacgcagcgaggacaggtataggaaccccaaaggaagtttcgaagttcagctggttgaatctggcggcggactggttcaacctggcggatctctgagactgagctgtgccgcctctggctacgcctttagcagctactgggtcaactgggttcgacaggcccctggcaaaggactggaatgggtcgcccaaatctatcccggcgacggcgacaccaactacaacggcaagttcaagggcagattcaccatcagccgggacaacagcaagaacaccctgtacctccagatgaactccctgagagccgaggacaccgccgtgtactattgtgccagatccatcaccaccgtcgtgggctgcgctatggattattggggccagggaaccctggtcaccgtgtcctctacgcgtatccagaaccctgatcctgccgtgtaccagctgcgggatagcaagagcagcgacaagagcgtgtgtctgttcaccgacttcgacagccagaccaacgtgtcccagagcaaggactccgacgtgtacatcaccgataagtgcgtgctggacatgcggagcatggacttcaagagcaactccgccgtggcctggtccaacaagtccgatttcgcctgcgccaacgccttcaacaacagcattatccccgaggacacattcttcccaagccccgagagcagctgcgacgtgaagctggtggaaaagagcttcgagacagacaccaacctgaacttccagaacctgagcgtgatcggcttcagaatcctgctgctgaaagtggccggctttaacctgctgatgaccctgcggctgtggtccagctaa

SEQ ID NO: 8860 - DNA, 2277 bp, synthetic construct; identical to SEQ ID NO: 4965
  source 1..2277: mol_type = other DNA

SEQ ID NO: 8861 - DNA, 2691 bp, synthetic construct
  source 1..2691: mol_type = other DNA
atggccttaccagtgaccgccttgctcctgccgctggccttgctgctccacgccgccaggccggaagtgcagctggttgaatctggcggaggactggttcaggctggcggatctctgagactgtcttgtgccgccagcggcagaacctttagcatgggctggtttagacaggcccctggcaaagagagagagttcgtcgccgccatcacatactctggcggcagcccttactacgccgactctgtgaagggcagattcaccatcagccgggacaacgccaagaacaccgtgtacctccagatgaacagcctgaagcctgaggacaccgccgtgtactactgcgccgccaatccaacatacggcagcgactggaacgccgagaattggggccagggaacccaagtgacagtgtctagcggtaccgcaagaagtgaagatcgctacaggaaccctaaggggtcagaattcgacatccagatgacacagagccctagcagcctgtctgccagcgtgggagacagagtgaccatcacatgcaaggccagcgaccacatcaacaactggctggcctggtatcagcagaagcctggacaggcccctaagctgctgatctacggcgctaccacactggaaacaggcgtgcccagcagattttctggcagcggctctggcaccgactacaccctgacaatatccagcctccagcctgaggacttcgccacctactactgtcagcagagctggaacaccccttggacattcggccagggcaccaagctggaaatcaagagactcgaggacctgaagaacgtgttcccacctgaggtggccgtgttcgagcctagcgaggccgagatcagccacacccagaaagccaccctcgtgtgcctggctaccggcttctaccccgaccatgtggaactgtcttggtgggtcaacggcaaagaggtgcacagcggcgtgtgtaccgacccccagccactgaaagaacagcccgccctgaacgacagccggtactgcctgagcagcagactgagagtgtccgccaccttctggcagaacccccggaaccacttcagatgccaggtgcagttctacggcctgagcgagaacgacgagtggacccaggacagagccaagcccgtgacccagatcgtgtctgccgaagcctggggcagagccgattgcggctttaccagcgagagctaccagcagggcgtgctgagcgccaccatcctgtacgagatcctgctgggcaaggccaccctgtacgccgtgctggtgtctgccctggtgctgatggctatggtcaagcggaaggacagccggggaagggccaagcgatctggatctggagcaacaaacttctcactactcaaacaagcaggtgacgtggaggagaatcccgggcctactagtgccaccatggactggatttggcgcatccttttccttgtcggcgctgctaccggcgcccattccgggccccagctccagctgcaagagtctggacctggcctggtcaagcctagcgagacactgagcctgacctgtaccgtgtccggcgatagcatcagcagcggcgattactactggggctggatcagacagcctcctggcaaaggactggaatggatcggccacatctactacagcggcatcagctactacaaccccagcctgaagtccagagtgaccatcagcgtggacaccagccggaaccagttctccctgaagctgtctagcgtgacagccgccgataccgccgtgtactactgcaccagagaggacagcagcaactggcggagtagaggccagggaacactggtcacagttagctctggatccggcggcggaggatctggcggaggcggatctgggggcggaggctctttcgaacaagttcagcttcaacagcctggcgctgagctggtcaaacctggcgcttctgtgaagatgagctgcaaagccagcggctacgccttcagcagctactggatcaactggatgaagcagaaacccggccagggactcgaatggatcggccaaatctatcccggcgacggcgacaccaactacaacggcaagttcaagggcagagccacactgaccgccgatacctctagcagcacagcctacatgcagctgagcagcctgaccagcgaagatagcgccgtgtacttctgtgcccggtccatcacaacagtcgtgggctgcgctatggactattggggccagggaacaagcgtgaccgtgtctagtacgcgtatccagaaccctgatcctgccgtgtaccagctgcgggatagcaagagcagcgacaagagcgtgtgtctgttcaccgacttcgacagccagaccaacgtgtcccagagcaaggactccgacgtgtacatcaccgataagtgcgtgctggacatgcggagcatggacttcaagagcaactccgccgtggcctggtccaacaagtccgatttcgcctgcgccaacgccttcaacaacagcattatccccgaggacacattcttcccaagccccgagagcagctgcgacgtgaagctggtggaaaagagcttcgagacagacaccaacctgaacttccagaacctgagcgtgatcggcttcagaatcctgctgctgaaagtggccggctttaacctgctgatgaccctgcggctgtggtccagctaa

SEQ ID NO: 8862 - DNA, 2691 bp, synthetic construct
  source 1..2691: mol_type = other DNA
atggccttaccagtgaccgccttgctcctgccgctggccttgctgctccacgccgccaggccggaagtgcagctggttgaatctggcggaggactggttcaggctggcggatctctgagactgtcttgtgccgccagcggcagaacctttagcatgggctggtttagacaggcccctggcaaagagagagagttcgtcgccgccatcacatactctggcggcagcccttactacgccgactctgtgaagggcagattcaccatcagccgggacaacgccaagaacaccgtgtacctccagatgaacagcctgaagcctgaggacaccgccgtgtactactgcgccgccaatccaacatacggcagcgactggaacgccgagaattggggccagggaacccaagtgacagtgtctagcggtaccgcaagaagtgaagatcgctacaggaaccctaaggggtcagaattcgacatccagatgacacagagccctagcagcctgtctgccagcgtgggagacagagtgaccatcacatgcaaggccagcgaccacatcaacaactggctggcctggtatcagcagaagcctggacaggcccctaagctgctgatctacggcgctaccacactggaaacaggcgtgcccagcagattttctggcagcggctctggcaccgactacaccctgacaatatccagcctccagcctgaggacttcgccacctactactgtcagcagagctggaacaccccttggacattcggccagggcaccaagctggaaatcaagagactcgaggacctgaagaacgtgttcccacctgaggtggccgtgttcgagcctagcgaggccgagatcagccacacccagaaagccaccctcgtgtgcctggctaccggcttctaccccgaccatgtggaactgtcttggtgggtcaacggcaaagaggtgcacagcggcgtgtgtaccgacccccagccactgaaagaacagcccgccctgaacgacagccggtactgcctgagcagcagactgagagtgtccgccaccttctggcagaacccccggaaccacttcagatgccaggtgcagttctacggcctgagcgagaacgacgagtggacccaggacagagccaagcccgtgacccagatcgtgtctgccgaagcctggggcagagccgattgcggctttaccagcgagagctaccagcagggcgtgctgagcgccaccatcctgtacgagatcctgctgggcaaggccaccctgtacgccgtgctggtgtctgccctggtgctgatggctatggtcaagcggaaggacagccggggaagggccaagcgatctggatctggagcaacaaacttctcactactcaaacaagcaggtgacgtggaggagaatcccgggcctactagtgccaccatggactggatttggcgcatccttttccttgtcggcgctgctaccggcgcccattccgggccccagctccagctgcaagagtctggacctggcctggtcaagcctagcgagacactgagcctgacctgtaccgtgtccggcgatagcatcagcagcggcgattactactggggctggatcagacagcctcctggcaaaggactggaatggatcggccacatctactacagcggcgtgacctactacaaccccagcctgaagtccagagtgaccatcagcgtggacaccagccggaaccagttctccctgaagctgtctagcgtgacagccgccgataccgccgtgtactactgcaccagagaggacagcagcaactggcggagtagaggccagggaacactggtcacagttagctctggatccggcggcggaggatctggcggaggcggatctgggggcggaggctctttcgaacaagttcagcttcaacagcctggcgctgagctggtcaaacctggcgcttctgtgaagatgagctgcaaagccagcggctacgccttcagcagctactggatcaactggatgaagcagaaacccggccagggactcgaatggatcggccaaatctatcccggcgacggcgacaccaactacaacggcaagttcaagggcagagccacactgaccgccgatacctctagcagcacagcctacatgcagctgagcagcctgaccagcgaagatagcgccgtgtacttctgtgcccggtccatcacaacagtcgtgggctgcgctatggactattggggccagggaacaagcgtgaccgtgtctagtacgcgtatccagaaccctgatcctgccgtgtaccagctgcgggatagcaagagcagcgacaagagcgtgtgtctgttcaccgacttcgacagccagaccaacgtgtcccagagcaaggactccgacgtgtacatcaccgataagtgcgtgctggacatgcggagcatggacttcaagagcaactccgccgtggcctggtccaacaagtccgatttcgcctgcgccaacgccttcaacaacagcattatccccgaggacacattcttcccaagccccgagagcagctgcgacgtgaagctggtggaaaagagcttcgagacagacaccaacctgaacttccagaacctgagcgtgatcggcttcagaatcctgctgctgaaagtggccggctttaacctgctgatgaccctgcggctgtggtccagctaa

SEQ ID NO: 8863 - DNA, 2277 bp, synthetic construct
  source 1..2277: mol_type = other DNA
atggccttaccagtgaccgccttgctcctgccgctggccttgctgctccacgccgccaggccggacatccagatgacacagagccctagcagcctgtctgccagcgtgggagacagagtgaccatcacatgcaaggccagcgaccacatcaacaactggctggcctggtatcagcagaagcctggcaaggcccctaagctgctgatctacggcgctaccacactggaaacaggcgtgcccagcagattttctggcagcggctctggcaccgacttcaccctgacaatatccagcctccagcctgaggacttcgccacctactactgtcagcagagctggaacaccccttggacattcggccagggcaccaaggtggaaatcaagagactcgaggacctgaagaacgtgttcccacctgaggtggccgtgttcgagcctagcgaggccgagatcagccacacccagaaagccaccctcgtgtgcctggctaccggcttctaccccgaccatgtggaactgtcttggtgggtcaacggcaaagaggtgcacagcggcgtgtgtaccgacccccagccactgaaagaacagcccgccctgaacgacagccggtactgcctgagcagcagactgagagtgtccgccaccttctggcagaacccccggaaccacttcagatgccaggtgcagttctacggcctgagcgagaacgacgagtggacccaggacagagccaagcccgtgacccagatcgtgtctgccgaagcctggggcagagccgattgcggctttaccagcgagagctaccagcagggcgtgctgagcgccaccatcctgtacgagatcctgctgggcaaggccaccctgtacgccgtgctggtgtctgccctggtgctgatggctatggtcaagcggaaggacagccggggaagggccaagcgatctggatctggagcaacaaacttctcactactcaaacaagcaggtgacgtggaggagaatcccgggcctactagtgccaccatggactggatttggcgcatccttttccttgtcggcgctgctaccggcgcccattccgggccccagctccagctgcaagagtctggacctggcctggtcaagcctagcgagacactgagcctgacctgtaccgtgtccggcgatagcatcagcagcggcgattactactggggctggatcagacagcctcctggcaaaggactggaatggatcggccacatctactacagcggcgtgacctactacaaccccagcctgaagtccagagtgaccatcagcgtggacaccagccggaaccagttctccctgaagctgtctagcgtgacagccgccgataccgccgtgtactactgcaccagagaggacagcagcaactggcggagtagaggccagggaacactggtcacagttagctctggatccgcacgcagcgaggacaggtataggaaccccaaaggaagtttcgaagttcagctggttgaatctggcggcggactggttcaacctggcggatctctgagactgagctgtgccgcctctggctacgcctttagcagctactgggtcaactgggttcgacaggcccctggcaaaggactggaatgggtcgcccaaatctatcccggcgacggcgacaccaactacaacggcaagttcaagggcagattcaccatcagccgggacaacagcaagaacaccctgtacctccagatgaactccctgagagccgaggacaccgccgtgtactattgtgccagatccatcaccaccgtcgtgggctgcgctatggattattggggccagggaaccctggtcaccgtgtcctctacgcgtatccagaaccctgatcctgccgtgtaccagctgcgggatagcaagagcagcgacaagagcgtgtgtctgttcaccgacttcgacagccagaccaacgtgtcccagagcaaggactccgacgtgtacatcaccgataagtgcgtgctggacatgcggagcatggacttcaagagcaactccgccgtggcctggtccaacaagtccgatttcgcctgcgccaacgccttcaacaacagcattatccccgaggacacattcttcccaagccccgagagcagctgcgacgtgaagctggtggaaaagagcttcgagacagacaccaacctgaacttccagaacctgagcgtgatcggcttcagaatcctgctgctgaaagtggccggctttaacctgctgatgaccctgcggctgtggtccagctaa

SEQ ID NO: 8864 - DNA, 1899 bp, synthetic construct
  source 1..1899: mol_type = other DNA
atggccttaccagtgaccgccttgctcctgccgctggccttgctgctccacgccgccaggccggacatccagatgacacagagccctagcagcctgtctgccagcgtgggagacagagtgaccatcacatgcaaggccagcgaccacatcaacaactggctggcctggtatcagcagaagcctggcaaggcccctaagctgctgatctacggcgctaccacactggaaacaggcgtgcccagcagattttctggcagcggctctggcaccgacttcaccctgacaatatccagcctccagcctgaggacttcgccacctactactgtcagcagagctggaacaccccttggacattcggccagggcaccaaggtggaaatcaagagactcgaggacctgaagaacgtgttcccacctgaggtggccgtgttcgagcctagcgaggccgagatcagccacacccagaaagccaccctcgtgtgcctggctaccggcttctaccccgaccatgtggaactgtcttggtgggtcaacggcaaagaggtgcacagcggcgtgtgtaccgacccccagccactgaaagaacagcccgccctgaacgacagccggtactgcctgagcagcagactgagagtgtccgccaccttctggcagaacccccggaaccacttcagatgccaggtgcagttctacggcctgagcgagaacgacgagtggacccaggacagagccaagcccgtgacccagatcgtgtctgccgaagcctggggcagagccgattgcggctttaccagcgagagctaccagcagggcgtgctgagcgccaccatcctgtacgagatcctgctgggcaaggccaccctgtacgccgtgctggtgtctgccctggtgctgatggctatggtcaagcggaaggacagccggggaagggccaagcgatctggatctggagcaacaaacttctcactactcaaacaagcaggtgacgtggaggagaatcccgggcctactagtgccaccatggactggatttggcgcatccttttccttgtcggcgctgctaccggcgcccattccgggccccactatggatatccaggggtattcgaagttcagctggttgaatctggcggcggactggttcaacctggcggatctctgagactgagctgtgccgcctctggctacgcctttagcagctactgggtcaactgggttcgacaggcccctggcaaaggactggaatgggtcgcccaaatctatcccggcgacggcgacaccaactacaacggcaagttcaagggcagattcaccatcagccgggacaacagcaagaacaccctgtacctccagatgaactccctgagagccgaggacaccgccgtgtactattgtgccagatccatcaccaccgtcgtgggctgcgctatggattattggggccagggaaccctggtcaccgtgtcctctacgcgtatccagaaccctgatcctgccgtgtaccagctgcgggatagcaagagcagcgacaagagcgtgtgtctgttcaccgacttcgacagccagaccaacgtgtcccagagcaaggactccgacgtgtacatcaccgataagtgcgtgctggacatgcggagcatggacttcaagagcaactccgccgtggcctggtccaacaagtccgatttcgcctgcgccaacgccttcaacaacagcattatccccgaggacacattcttcccaagccccgagagcagctgcgacgtgaagctggtggaaaagagcttcgagacagacaccaacctgaacttccagaacctgagcgtgatcggcttcagaatcctgctgctgaaagtggccggctttaacctgctgatgaccctgcggctgtggtccagctaa

SEQ ID NO: 8865 - DNA, 2259 bp, synthetic construct
  source 1..2259: mol_type = other DNA
atggccttaccagtgaccgccttgctcctgccgctggccttgctgctccacgccgccaggccggacatccagatgacacagagccctagcagcctgtctgccagcgtgggagacagagtgaccatcacatgcaaggccagcgaccacatcaacaactggctggcctggtatcagcagaagcctggcaaggcccctaagctgctgatctacggcgctaccacactggaaacaggcgtgcccagcagattttctggcagcggctctggcaccgacttcaccctgacaatatccagcctccagcctgaggacttcgccacctactactgtcagcagagctggaacaccccttggacattcggccagggcaccaaggtggaaatcaagagactcgaggacctgaagaacgtgttcccacctgaggtggccgtgttcgagcctagcgaggccgagatcagccacacccagaaagccaccctcgtgtgcctggctaccggcttctaccccgaccatgtggaactgtcttggtgggtcaacggcaaagaggtgcacagcggcgtgtgtaccgacccccagccactgaaagaacagcccgccctgaacgacagccggtactgcctgagcagcagactgagagtgtccgccaccttctggcagaacccccggaaccacttcagatgccaggtgcagttctacggcctgagcgagaacgacgagtggacccaggacagagccaagcccgtgacccagatcgtgtctgccgaagcctggggcagagccgattgcggctttaccagcgagagctaccagcagggcgtgctgagcgccaccatcctgtacgagatcctgctgggcaaggccaccctgtacgccgtgctggtgtctgccctggtgctgatggctatggtcaagcggaaggacagccggggaagggccaagcgatctggatctggagcaacaaacttctcactactcaaacaagcaggtgacgtggaggagaatcccgggcctactagtgccaccatggactggatttggcgcatccttttccttgtcggcgctgctaccggcgcccattccgggccccagctccagctgcaagagtctggacctggcctggtcaagcctagcgagacactgagcctgacctgtaccgtgtccggcgatagcatcagcagcggcgattactactggggctggatcagacagcctcctggcaaaggactggaatggatcggccacatctactacagcggcgtgacctactacaaccccagcctgaagtccagagtgaccatcagcgtggacaccagccggaaccagttctccctgaagctgtctagcgtgacagccgccgataccgccgtgtactactgcaccagagaggacagcagcaactggcggagtagaggccagggaacactggtcacagttagctctggatcccgcagcgaggacaggtataggttcgaagttcagctggttgaatctggcggcggactggttcaacctggcggatctctgagactgagctgtgccgcctctggctacgcctttagcagctactgggtcaactgggttcgacaggcccctggcaaaggactggaatgggtcgcccaaatctatcccggcgacggcgacaccaactacaacggcaagttcaagggcagattcaccatcagccgggacaacagcaagaacaccctgtacctccagatgaactccctgagagccgaggacaccgccgtgtactattgtgccagatccatcaccaccgtcgtgggctgcgctatggattattggggccagggaaccctggtcaccgtgtcctctacgcgtatccagaaccctgatcctgccgtgtaccagctgcgggatagcaagagcagcgacaagagcgtgtgtctgttcaccgacttcgacagccagaccaacgtgtcccagagcaaggactccgacgtgtacatcaccgataagtgcgtgctggacatgcggagcatggacttcaagagcaactccgccgtggcctggtccaacaagtccgatttcgcctgcgccaacgccttcaacaacagcattatccccgaggacacattcttcccaagccccgagagcagctgcgacgtgaagctggtggaaaagagcttcgagacagacaccaacctgaacttccagaacctgagcgtgatcggcttcagaatcctgctgctgaaagtggccggctttaacctgctgatgaccctgcggctgtggtccagctaa

SEQ ID NO: 8866 - DNA, 2277 bp, synthetic construct; identical to SEQ ID NO: 8863
  source 1..2277: mol_type = other DNA

SEQ ID NO: 8867 - DNA, 2010 bp, synthetic construct
  source 1..2010: mol_type = other DNA
atggccttaccagtgaccgccttgctcctgccgctggccttgctgctccacgccgccaggccggctagaagcgaagatcggtatcggaaccccaaggaattcgacatcgtgatgacacagagccctgatagcctggccgtgtctctgggagagagagccaccatcaactgcaagagcagccagagcctgctgaacagcggcaacaacaagaactacgtgacatggtatcagcagaagcccggccagcctcctaagctgctgatctactggggcagcaccagatccacaggcgtgcccgatagattttctggctctggcagcggcaccgacttcaccctgacaatttctagcctgcaagccgaggacgtggccgtgtactactgccagaacgactacacataccccttcaccttcggccagggcaccaagctggaaatcaaactcgaggacctgaagaacgtgttcccacctgaggtggccgtgttcgagcctagcgaggccgagatcagccacacccagaaagccaccctcgtgtgcctggctaccggcttctaccccgaccatgtggaactgtcttggtgggtcaacggcaaagaggtgcacagcggcgtgtgtaccgacccccagccactgaaagaacagcccgccctgaacgacagccggtactgcctgagcagcagactgagagtgtccgccaccttctggcagaacccccggaaccacttcagatgccaggtgcagttctacggcctgagcgagaacgacgagtggacccaggacagagccaagcccgtgacccagatcgtgtctgccgaagcctggggcagagccgattgcggctttaccagcgagagctaccagcagggcgtgctgagcgccaccatcctgtacgagatcctgctgggcaaggccaccctgtacgccgtgctggtgtctgccctggtgctgatggctatggtcaagcggaaggacagccggggaagggccaagcgatctggatctggagcaacaaacttctcactactcaaacaagcaggtgacgtggaggagaatcccgggcctactagtgccaccatggactggatttggcgcatccttttccttgtcggcgctgctaccggcgcccattccgggcccgccagaagcgaggacagatacagaaaccccaaaggatccggcggcggaggatctggcggaggcggatctgggggcggaggctctttcgaacaagttcagctggttcagagcggagccgaagtgaagaaacctggggcctctgtgaaggtgtcctgcaaggcttccggctataccttcaccagcttttggctgaactgggtccgacaggcccctggacaaggactggaatggatgggcaacatctaccccagcaccagctacaccgtgtacaaccagaaattcaaggaccgcgtgaccatgaccagggacaccagcacaagcacagtgtacatggaactgagcagcctgcggagcgaggataccgccgtgtattattgcgccagaacctggcggggcaacagcttcgattattggggccagggaaccaccgtgaccgtgtcatctacgcgtatccagaaccctgatcctgccgtgtaccagctgcgggatagcaagagcagcgacaagagcgtgtgtctgttcaccgacttcgacagccagaccaacgtgtcccagagcaaggactccgacgtgtacatcaccgataagtgcgtgctggacatgcggagcatggacttcaagagcaactccgccgtggcctggtccaacaagtccgatttcgcctgcgccaacgccttcaacaacagcattatccccgaggacacattcttcccaagccccgagagcagctgcgacgtgaagctggtggaaaagagcttcgagacagacaccaacctgaacttccagaacctgagcgtgatcggcttcagaatcctgctgctgaaagtggccggctttaacctgctgatgaccctgcggctgtggtccagctaa

SEQ ID NO: 8868 - DNA, 2286 bp, synthetic construct
  source 1..2286: mol_type = other DNA
atggccttaccagtgaccgccttgctcctgccgctggccttgctgctccacgccgccaggccggacatccagttgacccagtcccccagctcactcagcgccagtgtgggggaccgggtgaccattacctgtaaagccagtcagagtgtggactatgagggggatagcttcctgaattggtatcagcagaagcctggcaaagccccaaagctgctgatctacgctgcatctaatctggagtcaggcgtgccttctaggttctccggtagtgggtctgggaccgatttcacattgaccatttcatccctccaacccgaggatttcgctacatattactgtcagcagtccaatgaggaccctctcacctttggccagggcaccaaagttgaaattaagagactcgaggacctgaagaacgtgttcccacctgaggtggccgtgttcgagcctagcgaggccgagatcagccacacccagaaagccaccctcgtgtgcctggctaccggcttctaccccgaccatgtggaactgtcttggtgggtcaacggcaaagaggtgcacagcggcgtgtgtaccgacccccagccactgaaagaacagcccgccctgaacgacagccggtactgcctgagcagcagactgagagtgtccgccaccttctggcagaacccccggaaccacttcagatgccaggtgcagttctacggcctgagcgagaacgacgagtggacccaggacagagccaagcccgtgacccagatcgtgtctgccgaagcctggggcagagccgattgcggctttaccagcgagagctaccagcagggcgtgctgagcgccaccatcctgtacgagatcctgctgggcaaggccaccctgtacgccgtgctggtgtctgccctggtgctgatggctatggtcaagcggaaggacagccggggaagggccaagcgatctggatctggagcaacaaacttctcactactcaaacaagcaggtgacgtggaggagaatcccgggcctactagtgccaccatggactggatttggcgcatccttttccttgtcggcgctgctaccggcgcccattccgggcccgaagtgcaactggttgaatccggtggcggcctggtgcaagcaggcggatctctcagacttagctgtgccgcctccggcagaaccttcacaatgggatggtttaggcaggctccagggaaagagagagagttcgtcgccgccatctctctgtctcccacactggcctactacgccgactctgtgaaaggccggttcaccatctccagagataatgccaagaacaccgtggtgctgcaaatgaactctctgaaacccgaggatacagccctgtactattgtgccgctgaccggaagtccgtgatgagcatcagacccgattactggggacagggcacacaagtcacagtgtcctctggatccggcggcggaggatctggcggaggcggatctgggggcggaggctctttcgaagaagtccaacttgtggagtctggagggggcctggtgcagcccggcggctctctcagactgtcttgtgcggcaagcggctacaccttcagctcttactggatagaatgggtgaggcaggcacctggaaagggactggagtggattggagagattctgccaggagggggagatacaaattacaatgaaatcttcaaggggcgggccaccttttcagcggataccagcaagaatacagcttacctgcagatgaatagcctccgggcagaagataccgctgtttattattgcacgagacgggtgccaataagactggactattgggggcaagggactcttgtcaccgtcagttcaacgcgtatccagaaccctgatcctgccgtgtaccagctgcgggatagcaagagcagcgacaagagcgtgtgtctgttcaccgacttcgacagccagaccaacgtgtcccagagcaaggactccgacgtgtacatcaccgataagtgcgtgctggacatgcggagcatggacttcaagagcaactccgccgtggcctggtccaacaagtccgatttcgcctgcgccaacgccttcaacaacagcattatccccgaggacacattcttcccaagccccgagagcagctgcgacgtgaagctggtggaaaagagcttcgagacagacaccaacctgaacttccagaacctgagcgtgatcggcttcagaatcctgctgctgaaagtggccggctttaacctgctgatgaccctgcggctgtggtccagctaa

SEQ ID NO: 8869 - DNA, 2286 bp, synthetic construct
  source 1..2286: mol_type = other DNA
atggccttaccagtgaccgccttgctcctgccgctggccttgctgctccacgccgccaggccggacatccagttgacccagtcccccagctcactcagcgccagtgtgggggaccgggtgaccattacctgtaaagccagtcagagtgtggactatgagggggatagcttcctgaattggtatcagcagaagcctggcaaagccccaaagctgctgatctacgctgcatctaatctggagtcaggcgtgccttctaggttctccggtagtgggtctgggaccgatttcacattgaccatttcatccctccaacccgaggatttcgctacatattactgtcagcagtccaatgaggaccctctcacctttggccagggcaccaaagttgaaattaagagactcgaggacctgaagaacgtgttcccacctgaggtggccgtgttcgagcctagcgaggccgagatcagccacacccagaaagccaccctcgtgtgcctggctaccggcttctaccccgaccatgtggaactgtcttggtgggtcaacggcaaagaggtgcacagcggcgtgtgtaccgacccccagccactgaaagaacagcccgccctgaacgacagccggtactgcctgagcagcagactgagagtgtccgccaccttctggcagaacccccggaaccacttcagatgccaggtgcagttctacggcctgagcgagaacgacgagtggacccaggacagagccaagcccgtgacccagatcgtgtctgccgaagcctggggcagagccgattgcggctttaccagcgagagctaccagcagggcgtgctgagcgccaccatcctgtacgagatcctgctgggcaaggccaccctgtacgccgtgctggtgtctgccctggtgctgatggctatggtcaagcggaaggacagccggggaagggccaagcgatctggatctggagcaacaaacttctcactactcaaacaagcaggtgacgtggaggagaatcccgggcctactagtgccaccatggactggatttggcgcatccttttccttgtcggcgctgctaccggcgcccattccgggcccgaagtgcagctggttgaatctggcggaggactggttcaggctggcggatctctgagactgtcttgtgccgccagcggcagaacctttagcatgggctggtttagacaggcccctggcaaagagagagagttcgtcgccgccatcacatactctggcggcagcccttactacgccgactctgtgaagggcagattcaccatcagccgggacaacgccaagaacaccgtgtacctccagatgaacagcctgaagcctgaggacaccgccgtgtactactgcgccgccaatccaacatacggcagcgactggaacgccgagaattggggccagggaacccaagtgacagtgtctagcggatccggcggcggaggatctggcggaggcggatctgggggcggaggctctttcgaagaagtccaacttgtggagtctggagggggcctggtgcagcccggcggctctctcagactgtcttgtgcggcaagcggctacaccttcagctcttactggatagaatgggtgaggcaggcacctggaaagggactggagtggattggagagattctgccaggagggggagatacaaattacaatgaaatcttcaaggggcgggccaccttttcagcggataccagcaagaatacagcttacctgcagatgaatagcctccgggcagaagataccgctgtttattattgcacgagacgggtgccaataagactggactattgggggcaagggactcttgtcaccgtcagttcaacgcgtatccagaaccctgatcctgccgtgtaccagctgcgggatagcaagagcagcgacaagagcgtgtgtctgttcaccgacttcgacagccagaccaacgtgtcccagagcaaggactccgacgtgtacatcaccgataagtgcgtgctggacatgcggagcatggacttcaagagcaactccgccgtggcctggtccaacaagtccgatttcgcctgcgccaacgccttcaacaacagcattatccccgaggacacattcttcccaagccccgagagcagctgcgacgtgaagctggtggaaaagagcttcgagacagacaccaacctgaacttccagaacctgagcgtgatcggcttcagaatcctgctgctgaaagtggccggctttaacctgctgatgaccctgcggctgtggtccagctaa

SEQ ID NO: 8870 - DNA, 2298 bp, synthetic construct
  source 1..2298: mol_type = other DNA
atggccttaccagtgaccgccttgctcctgccgctggccttgctgctccacgccgccaggccggacatccagttgacccagtcccccagctcactcagcgccagtgtgggggaccgggtgaccattacctgtaaagccagtcagagtgtggactatgagggggatagcttcctgaattggtatcagcagaagcctggcaaagccccaaagctgctgatctacgctgcatctaatctggagtcaggcgtgccttctaggttctccggtagtgggtctgggaccgatttcacattgaccatttcatccctccaacccgaggatttcgctacatattactgtcagcagtccaatgaggaccctctcacctttggccagggcaccaaagttgaaattaagagactcgaggacctgaagaacgtgttcccacctgaggtggccgtgttcgagcctagcgaggccgagatcagccacacccagaaagccaccctcgtgtgcctggctaccggcttctaccccgaccatgtggaactgtcttggtgggtcaacggcaaagaggtgcacagcggcgtgtgtaccgacccccagccactgaaagaacagcccgccctgaacgacagccggtactgcctgagcagcagactgagagtgtccgccaccttctggcagaacccccggaaccacttcagatgccaggtgcagttctacggcctgagcgagaacgacgagtggacccaggacagagccaagcccgtgacccagatcgtgtctgccgaagcctggggcagagccgattgcggctttaccagcgagagctaccagcagggcgtgctgagcgccaccatcctgtacgagatcctgctgggcaaggccaccctgtacgccgtgctggtgtctgccctggtgctgatggctatggtcaagcggaaggacagccggggaagggccaagcgatctggatctggagcaacaaacttctcactactcaaacaagcaggtgacgtggaggagaatcccgggcctactagtgccaccatggactggatttggcgcatccttttccttgtcggcgctgctaccggcgcccattccgggccccaggttcagctgcaagagtctggccctggcctggtcaagcctagccaaacactgagcctgacctgtaccgtgtctggcggctctatcaccaccggcgagttctactggaactggttcagacagcctcctggcaaaggactggaatggatgggagccattgccgccagcggcagcacaacatacagccctagcttcgagagccggaccagcatcagcagagacaccagcaagaatcagttcagcctgaagctgagcagcgtgacagccgccgatacagccgtgtattactgcggcagatcctttggagtggccgccgtgacaaccggccagaatagaggacagggcaccctggtcacagtgtctagcggatccggcggcggaggatctggcggaggcggatctgggggcggaggctctttcgaagaagtccaacttgtggagtctggagggggcctggtgcagcccggcggctctctcagactgtcttgtgcggcaagcggctacaccttcagctcttactggatagaatgggtgaggcaggcacctggaaagggactggagtggattggagagattctgccaggagggggagatacaaattacaatgaaatcttcaaggggcgggccaccttttcagcggataccagcaagaatacagcttacctgcagatgaatagcctccgggcagaagataccgctgtttattattgcacgagacgggtgccaataagactggactattgggggcaagggactcttgtcaccgtcagttcaacgcgtatccagaaccctgatcctgccgtgtaccagctgcgggatagcaagagcagcgacaagagcgtgtgtctgttcaccgacttcgacagccagaccaacgtgtcccagagcaaggactccgacgtgtacatcaccgataagtgcgtgctggacatgcggagcatggacttcaagagcaactccgccgtggcctggtccaacaagtccgatttcgcctgcgccaacgccttcaacaacagcattatccccgaggacacattcttcccaagccccgagagcagctgcgacgtgaagctggtggaaaagagcttcgagacagacaccaacctgaacttccagaacctgagcgtgatcggcttcagaatcctgctgctgaaagtggccggctttaacctgctgatgaccctgcggctgtggtccagctaa

SEQ ID NO: 8871 - DNA, 2568 bp, synthetic construct
  source 1..2568: mol_type = other DNA
atggccttaccagtgaccgccttgctcctgccgctggccttgctgctccacgccgccaggccggacatccagttgacccagtcccccagctcactcagcgccagtgtgggggaccgggtgaccattacctgtaaagccagtcagagtgtggactatgacggggatagcttcctgaattggtatcagcagaagcctggcaaagccccaaagctgctgatctacgctgcatctaatctggagtcaggcgtgccttccaggttctccggtagtgggtctgggaccgatttcacattgaccatttcatccctccaacccgaggatttcgctacatattactgtcagcagtccaatgaggaccctctcacctttggccagggcaccaaagttgaaattaagagactcgaggacctgaagaacgtgttcccacctgaggtggccgtgttcgagcctagcgaggccgagatcagccacacccagaaagccaccctcgtgtgcctggctaccggcttctaccccgaccatgtggaactgtcttggtgggtcaacggcaaagaggtgcacagcggcgtgtgtaccgacccccagccactgaaagaacagcccgccctgaacgacagccggtactgcctgagcagcagactgagagtgtccgccaccttctggcagaacccccggaaccacttcagatgccaggtgcagttctacggcctgagcgagaacgacgagtggacccaggacagagccaagcccgtgacccagatcgtgtctgccgaagcctggggcagagccgattgcggctttaccagcgagagctaccagcagggcgtgctgagcgccaccatcctgtacgagatcctgctgggcaaggccaccctgtacgccgtgctggtgtctgccctggtgctgatggctatggtcaagcggaaggacagccggggaagggccaagcgatctggatctggagcaacaaacttctcactactcaaacaagcaggtgacgtggaggagaatcccgggcctactagtatggactggatttggcgcatccttttccttgtcggcgctgctaccggcgcgcattccttcgaagaagtccaacttgtggagtctggagggggcctggtgcagcccggcggctctctcagactgtcttgtgcggcaagcggctacaccttcacctcttactggatagaatgggtgaggcaggcacctggaaagggactggagtggattggagagattctgccaggagggggagatacaaattacaatgaaatcttcaaggggcgggccaccttttcagcggataccagcaagaatacagcttacctgcagatgaatagcctccgggcagaagataccgctgtttattattgcacgagacgggtgccaataagactggactattgggggcaagggactcttgtcaccgtcagttcaacgcgtatccagaaccctgatcctgccgtgtaccagctgcgggatagcaagagcagcgacaagagcgtgtgtctgttcaccgacttcgacagccagaccaacgtgtcccagagcaaggactccgacgtgtacatcaccgataagtgcgtgctggacatgcggagcatggacttcaagagcaactccgccgtggcctggtccaacaagtccgatttcgcctgcgccaacgccttcaacaacagcattatccccgaggacacattcttcccaagccccgagagcagctgcgacgtgaagctggtggaaaagagcttcgagacagacaccaacctgaacttccagaacctgagcgtgatcggcttcagaatcctgctgctgaaagtggccggctttaacctgctgatgaccctgcggctgtggtccagccgcgccaagagaagcggatctggcgtgaagcagaccctgaatttcgacctgctgaagctggctggcgacgtggaatccaacccaggcccttctagaggccatatgaccgagtacaagcccacggtgcgcctcgccacccgcgacgacgtccccagggccgtacgcaccctcgccgccgcgttcgccgactaccccgccacgcgccacaccgtcgatccggaccgccacatcgagcgggtcaccgagctgcaagaactcttcctcacgcgcgtcgggctcgacatcggcaaggtgtgggtcgcggacgacggcgccgcggtggcggtctggaccacgccggagagcgtcgaagcgggggcggtgttcgccgagatcggcccgcgcatggccgagttgagcggttcccggctggccgcgcagcaacagatggaaggcctcctggcgccgcaccggcccaaggagcccgcgtggttcctggccaccgtcggcgtctcgcccgaccaccagggcaagggtctgggcagcgccgtcgtgctccccggagtggaggcggccgagcgcgccggggtgcccgccttcctggagacctccgcgccccgcaacctccccttctacgagcggctcggcttcaccgtcaccgccgacgtcgaggtgcccgaaggaccgcgcacctggtgcatgacccgcaagcccggtgcctga

SEQ ID NO: 8872 - DNA, 2286 bp, synthetic construct
  source 1..2286: mol_type = other DNA
atggccttaccagtgaccgccttgctcctgccgctggccttgctgctccacgccgccaggccggacatccagttgacccagtcccccagctcactcagcgccagtgtgggggaccgggtgaccattacctgtaaagccagtcagagtgtggactatgagggggatagcttcctgaattggtatcagcagaagcctggcaaagccccaaagctgctgatctacgctgcatctaatctggagtcaggcgtgccttctaggttctccggtagtgggtctgggaccgatttcacattgaccatttcatccctccaacccgaggatttcgctacatattactgtcagcagtccaatgaggaccctctcacctttggccagggcaccaaagttgaaattaagagactcgaggacctgaagaacgtgttcccacctgaggtggccgtgttcgagcctagcgaggccgagatcagccacacccagaaagccaccctcgtgtgcctggctaccggcttctaccccgaccatgtggaactgtcttggtgggtcaacggcaaagaggtgcacagcggcgtgtgtaccgacccccagccactgaaagaacagcccgccctgaacgacagccggtactgcctgagcagcagactgagagtgtccgccaccttctggcagaacccccggaaccacttcagatgccaggtgcagttctacggcctgagcgagaacgacgagtggacccaggacagagccaagcccgtgacccagatcgtgtctgccgaagcctggggcagagccgattgcggctttaccagcgagagctaccagcagggcgtgctgagcgccaccatcctgtacgagatcctgctgggcaaggccaccctgtacgccgtgctggtgtctgccctggtgctgatggctatggtcaagcggaaggacagccggggaagggccaagcgatctggatctggagcaacaaacttctcactactcaaacaagcaggtgacgtggaggagaatcccgggcctactagtgccaccatggactggatttggcgcatccttttccttgtcggcgctgctaccggcgcccattccgggccccagctccagctgcaagagtctggacctggcctggtcaagcctagcgagacactgagcctgacctgtaccgtgtccggcgatagcatcagcagcggcgattactactggggctggatcagacagcctcctggcaaaggactggaatggatcggccacatctactacaacggcatcagctactacaaccccagcctgaagtccagagtgaccatcagcgtggacaccagccggaaccagttctccctgaagctgtctagcgtgacagccgccgataccgccgtgtactactgcaccagagaggacagcagcaactggcggagtagaggccagggaacactggtcacagttagctctggatccggcggcggaggatctggcggaggcggatctgggggcggaggctctttcgaagaagtccaacttgtggagtctggagggggcctggtgcagcccggcggctctctcagactgtcttgtgcggcaagcggctacaccttcagctcttactggatagaatgggtgaggcaggcacctggaaagggactggagtggattggagagattctgccaggagggggagatacaaattacaatgaaatcttcaaggggcgggccaccttttcagcggataccagcaagaatacagcttacctgcagatgaatagcctccgggcagaagataccgctgtttattattgcacgagacgggtgccaataagactggactattgggggcaagggactcttgtcaccgtcagttcaacgcgtatccagaaccctgatcctgccgtgtaccagctgcgggatagcaagagcagcgacaagagcgtgtgtctgttcaccgacttcgacagccagaccaacgtgtcccagagcaaggactccgacgtgtacatcaccgataagtgcgtgctggacatgcggagcatggacttcaagagcaactccgccgtggcctggtccaacaagtccgatttcgcctgcgccaacgccttcaacaacagcattatccccgaggacacattcttcccaagccccgagagcagctgcgacgtgaagctggtggaaaagagcttcgagacagacaccaacctgaacttccagaacctgagcgtgatcggcttcagaatcctgctgctgaaagtggccggctttaacctgctgatgaccctgcggctgtggtccagctaa

SEQ ID NO: 8873 - DNA, 2673 bp, synthetic construct
  source 1..2673: mol_type = other DNA
atggccttaccagtgaccgccttgctcctgccgctggccttgctgctccacgccgccaggccgagctacgtgctgacacagcctccatccgtgtctgtggctccaggacagaccgccagaatcacatgcggcggcaacaacatcggcggcaagagcgtgcactggtatcagcagccacctggacaggctccagtggtggtggtgtacgacgacagcgatagacctagcggcatccccgagagattcagcggcagcaattccggcaataccgccacactgaccatcagcagagtggaagctggcgacgaggccgtgtactactgccaagtgtgggacagcagcagcgatcacgtggtgtttggcggcggaacaaagctgacagtgcttctcgaggacctgaagaacgtgttcccacctgaggtggccgtgttcgagcctagcgaggccgagatcagccacacccagaaagccaccctcgtgtgcctggctaccggcttctaccccgaccatgtggaactgtcttggtgggtcaacggcaaagaggtgcacagcggcgtgtgtaccgacccccagccactgaaagaacagcccgccctgaacgacagccggtactgcctgagcagcagactgagagtgtccgccaccttctggcagaacccccggaaccacttcagatgccaggtgcagttctacggcctgagcgagaacgacgagtggacccaggacagagccaagcccgtgacccagatcgtgtctgccgaagcctggggcagagccgattgcggctttaccagcgagagctaccagcagggcgtgctgagcgccaccatcctgtacgagatcctgctgggcaaggccaccctgtacgccgtgctggtgtctgccctggtgctgatggctatggtcaagcggaaggacagccggggaagggccaagcgatctggatctggagcaacaaacttctcactactcaaacaagcaggtgacgtggaggagaatcccgggcctactagtgccaccatggactggatttggcgcatccttttccttgtcggcgctgctaccggcgcccattccgggcccgccagaagcgaggacagatacagaggatccggcggcggaggatctggcggaggcggatctgggggcggaggctctttcgaacaactccagctgcaagagtctggccctggcctggtcaagcctagcgaaacactgagcctgacctgtaccgtgtctggcggctctatcagctccagcagctatttctggggctggatcagacaacctcctggcaaaggactggaatggatcggctccatctactacagcggcatcacctactacaaccccagcctgaagtccagagtgaccatctccgtggacaccagcaagaaccagttctccctgaagctgagcagcgtgacagccgccgataccgccgtgtattattgtgccagacatgacggcgctgtggccggcctgtttgattattggggacagggcaccctggtcaccgtgtcatctgctacgcgtatccagaaccctgatcctgccgtgtaccagctgcgggatagcaagagcagcgacaagagcgtgtgtctgttcaccgacttcgacagccagaccaacgtgtcccagagcaaggactccgacgtgtacatcaccgataagtgcgtgctggacatgcggagcatggacttcaagagcaactccgccgtggcctggtccaacaagtccgatttcgcctgcgccaacgccttcaacaacagcattatccccgaggacacattcttcccaagccccgagagcagctgcgacgtgaagctggtggaaaagagcttcgagacagacaccaacctgaacttccagaacctgagcgtgatcggcttcagaatcctgctgctgaaagtggccggctttaacctgctgatgaccctgcggctgtggtccagccgcgccaagagaagcggatctggcgtgaagcagaccctgaatttcgacctgctgaagctggctggcgacgtggaatccaacccaggcccttctagaatgtaccggatgcagctgctgagctgtatcgccctgtctctggccctggtcacaaatagcaactgggttaacgtgatctccgacctgaagaagatcgaggacctgatccagtccatgcacatcgacgccacactgtacaccgagagcgacgtgcaccctagctgtaaagtgaccgccatgaagtgctttctgctggaactgcaagtgatctccctggaaagcggcgacgccagcatccacgacaccgtgaagaacctgattatcctggctaacaacagcctgagcagcaacggcaacgtgaccgagtccggctgtaaagagtgcgaggaactggaagagaagaatatcaaagagttcctccagagcttcgtgcacatcgtgcagatgttcatcaacaccagcaagatcgaagtgatgtaccctcctccttacctggacaacgagaagtccaacggcaccatcatccacgtgaagggcaagcacctgtgtccttctccactgttccccggacctagcaagcctttctgggtgctcgttgttgttggcggcgtgctggcctgttacagcctgctggttaccgtggccttcatcatcttttgggtccgaagcaagcggagctaa

SEQ ID NO: 8874 - DNA, 2670 bp, synthetic construct
  source 1..2670: mol_type = other DNA
atggccttaccagtgaccgccttgctcctgccgctggccttgctgctccacgccgccaggccggacatccagatgacacagagccctagcagcctgtctgccagcgtgggagacagagtgaccatcacatgcaaggccagcgaccacatcaacaactggctggcctggtatcagcagaagcctggacaggcccctaagctgctgatctacggcgctaccacactggaaacaggcgtgcccagcagattttctggcagcggctctggcaccgactacaccctgacaatatccagcctccagcctgaggacttcgccacctactactgtcagcagagctggaacaccccttggacattcggccagggcaccaagctggaaatcaagagactcgaggacctgaagaacgtgttcccacctgaggtggccgtgttcgagcctagcgaggccgagatcagccacacccagaaagccaccctcgtgtgcctggctaccggcttctaccccgaccatgtggaactgtcttggtgggtcaacggcaaagaggtgcacagcggcgtgtgtaccgacccccagccactgaaagaacagcccgccctgaacgacagccggtactgcctgagcagcagactgagagtgtccgccaccttctggcagaacccccggaaccacttcagatgccaggtgcagttctacggcctgagcgagaacgacgagtggacccaggacagagccaagcccgtgacccagatcgtgtctgccgaagcctggggcagagccgattgcggctttaccagcgagagctaccagcagggcgtgctgagcgccaccatcctgtacgagatcctgctgggcaaggccaccctgtacgccgtgctggtgtctgccctggtgctgatggctatggtcaagcggaaggacagccggggaagggccaagcgatctggatctggagcaacaaacttctcactactcaaacaagcaggtgacgtggaggagaatcccgggcctactagtgccaccatggactggatttggcgcatccttttccttgtcggcgctgctaccggcgcccattccgggcccgccagaagcgaggacagatacagaggatccggcggcggaggatctggcggaggcggatctgggggcggaggctctttcgaacaagttcagcttcaacagcctggcgctgagctggtcaaacctggcgcttctgtgaagatgagctgcaaagccagcggctacgccttcagcagctactggatcaactggatgaagcagaaacccggccagggactcgaatggatcggccaaatctatcccggcgacggcgacaccaactacaacggcaagttcaagggcagagccacactgaccgccgatacctctagcagcacagcctacatgcagctgagcagcctgaccagcgaagatagcgccgtgtacttctgtgcccggtccatcacaacagtcgtgggctgcgctatggactattggggccagggaacaagcgtgaccgtgtctagtacgcgtatccagaaccctgatcctgccgtgtaccagctgcgggatagcaagagcagcgacaagagcgtgtgtctgttcaccgacttcgacagccagaccaacgtgtcccagagcaaggactccgacgtgtacatcaccgataagtgcgtgctggacatgcggagcatggacttcaagagcaactccgccgtggcctggtccaacaagtccgatttcgcctgcgccaacgccttcaacaacagcattatccccgaggacacattcttcccaagccccgagagcagctgcgacgtgaagctggtggaaaagagcttcgagacagacaccaacctgaacttccagaacctgagcgtgatcggcttcagaatcctgctgctgaaagtggccggctttaacctgctgatgaccctgcggctgtggtccagccgcgccaagagaagcggatctggcgtgaagcagaccctgaatttcgacctgctgaagctggctggcgacgtggaatccaacccaggcccttctagaatgtaccggatgcagctgctgagctgtatcgccctgtctctggccctggtcacaaatagcaactgggttaacgtgatctccgacctgaagaagatcgaggacctgatccagtccatgcacatcgacgccacactgtacaccgagagcgacgtgcaccctagctgtaaagtgaccgccatgaagtgctttctgctggaactgcaagtgatctccctggaaagcggcgacgccagcatccacgacaccgtgaagaacctgattatcctggctaacaacagcctgagcagcaacggcaacgtgaccgagtccggctgtaaagagtgcgaggaactggaagagaagaatatcaaagagttcctccagagcttcgtgcacatcgtgcagatgttcatcaacaccagcaagatcgaagtgatgtaccctcctccttacctggacaacgagaagtccaacggcaccatcatccacgtgaagggcaagcacctgtgtccttctccactgttccccggacctagcaagcctttctgggtgctcgttgttgttggcggcgtgctggcctgttacagcctgctggttaccgtggccttcatcatcttttgggtccgaagcaagcggagctaa

SEQ ID NO: 8875 - DNA, 2682 bp, synthetic construct
  source 1..2682: mol_type = other DNA
atggccttaccagtgaccgccttgctcctgccgctggccttgctgctccacgccgccaggccgagctacgtgctgacacagcctccatccgtgtctgtggctccaggacagaccgccagaatcacatgcggcggcaacaacatcggcggcaagagcgtgcactggtatcagcagccacctggacaggctccagtggtggtggtgtacgacgacagcgatagacctagcggcatccccgagagattcagcggcagcaattccggcaataccgccacactgaccatcagcagagtggaagctggcgacgaggccgtgtactactgccaagtgtgggacagcagcagcgatcacgtggtgtttggcggcggaacaaagctgacagtgcttctcgaggacctgaagaacgtgttcccacctgaggtggccgtgttcgagcctagcgaggccgagatcagccacacccagaaagccaccctcgtgtgcctggctaccggcttctaccccgaccatgtggaactgtcttggtgggtcaacggcaaagaggtgcacagcggcgtgtgtaccgacccccagccactgaaagaacagcccgccctgaacgacagccggtactgcctgagcagcagactgagagtgtccgccaccttctggcagaacccccggaaccacttcagatgccaggtgcagttctacggcctgagcgagaacgacgagtggacccaggacagagccaagcccgtgacccagatcgtgtctgccgaagcctggggcagagccgattgcggctttaccagcgagagctaccagcagggcgtgctgagcgccaccatcctgtacgagatcctgctgggcaaggccaccctgtacgccgtgctggtgtctgccctggtgctgatggctatggtcaagcggaaggacagccggggaagggccaagcgatctggatctggagcaacaaacttctcactactcaaacaagcaggtgacgtggaggagaatcccgggcctactagtgccaccatggactggatttggcgcatccttttccttgtcggcgctgctaccggcgcccattccgggcccgccagaagcgaggacagatacagaaaccccaaaggatccggcggcggaggatctggcggaggcggatctgggggcggaggctctttcgaacaactccagctgcaagagtctggccctggcctggtcaagcctagcgaaacactgagcctgacctgtaccgtgtctggcggctctatcagctccagcagctatttctggggctggatcagacaacctcctggcaaaggactggaatggatcggctccatctactacagcggcatcacctactacaaccccagcctgaagtccagagtgaccatctccgtggacaccagcaagaaccagttctccctgaagctgagcagcgtgacagccgccgataccgccgtgtattattgtgccagacatgacggcgctgtggccggcctgtttgattattggggacagggcaccctggtcaccgtgtcatctgctacgcgtatccagaaccctgatcctgccgtgtaccagctgcgggatagcaagagcagcgacaagagcgtgtgtctgttcaccgacttcgacagccagaccaacgtgtcccagagcaaggactccgacgtgtacatcaccgataagtgcgtgctggacatgcggagcatggacttcaagagcaactccgccgtggcctggtccaacaagtccgatttcgcctgcgccaacgccttcaacaacagcattatccccgaggacacattcttcccaagccccgagagcagctgcgacgtgaagctggtggaaaagagcttcgagacagacaccaacctgaacttccagaacctgagcgtgatcggcttcagaatcctgctgctgaaagtggccggctttaacctgctgatgaccctgcggctgtggtccagccgcgccaagagaagcggatctggcgtgaagcagaccctgaatttcgacctgctgaagctggctggcgacgtggaatccaacccaggcccttctagaatgtaccggatgcagctgctgagctgtatcgccctgtctctggccctggtcacaaatagcaactgggttaacgtgatctccgacctgaagaagatcgaggacctgatccagtccatgcacatcgacgccacactgtacaccgagagcgacgtgcaccctagctgtaaagtgaccgccatgaagtgctttctgctggaactgcaagtgatctccctggaaagcggcgacgccagcatccacgacaccgtgaagaacctgattatcctggctaacaacagcctgagcagcaacggcaacgtgaccgagtccggctgtaaagagtgcgaggaactggaagagaagaatatcaaagagttcctccagagcttcgtgcacatcgtgcagatgttcatcaacaccagcaagatcgaagtgatgtaccctcctccttacctggacaacgagaagtccaacggcaccatcatccacgtgaagggcaagcacctgtgtccttctccactgttccccggacctagcaagcctttctgggtgctcgttgttgttggcggcgtgctggcctgttacagcctgctggttaccgtggccttcatcatcttttgggtccgaagcaagcggagctaa

SEQ ID NO: 8876 - DNA, 2595 bp, synthetic construct
  source 1..2595: mol_type = other DNA
atggccttaccagtgaccgccttgctcctgccgctggccttgctgctccacgccgccaggccgagctacgtgctgacacagcctccatccgtgtctgtggctccaggacagaccgccagaatcacatgcggcggcaacaacatcggcggcaagagcgtgcactggtatcagcagccacctggacaggctccagtggtggtggtgtacgacgacagcgatagacctagcggcatccccgagagattcagcggcagcaattccggcaataccgccacactgaccatcagcagagtggaagctggcgacgaggccgtgtactactgccaagtgtgggacagcagcagcgatcacgtggtgtttggcggcggaacaaagctgacagtgcttctcgagatccagaaccctgatcctgccgtgtaccagctgcgggatagcaagagcagcgacaagagcgtgtgtctgttcaccgacttcgacagccagaccaacgtgtcccagagcaaggactccgacgtgtacatcaccgataagtgcgtgctggacatgcggagcatggacttcaagagcaactccgccgtggcctggtccaacaagtccgatttcgcctgcgccaacgccttcaacaacagcattatccccgaggacacattcttcccaagccccgagagcagctgcgacgtgaagctggtggaaaagagcttcgagacagacaccaacctgaacttccagaacctgagcgtgatcggcttcagaatcctgctgctgaaagtggccggctttaacctgctgatgaccctgcggctgtggtccagctctagtcgcgccaagagaagcggatctggcgtgaagcagaccctgaatttcgacctgctgaagctggctggcgacgtggaatccaacccaggccctactagtatggactggatttggcgcatccttttccttgtcggcgctgctaccggcgcgcattccttcgaacaactccagctgcaagagtctggccctggcctggtcaagcctagcgaaacactgagcctgacctgtaccgtgtctggcggctctatcagctccagcagctatttctggggctggatcagacaacctcctggcaaaggactggaatggatcggctccatctactacagcggcatcacctactacaaccccagcctgaagtccagagtgaccatctccgtggacaccagcaagaaccagttctccctgaagctgagcagcgtgacagccgccgataccgccgtgtattattgtgccagacatgacggcgctgtggccggcctgtttgattattggggacagggcaccctggtcaccgtgtcatctgctacgcgtgaggacctgaagaacgtgttcccacctgaggtggccgtgttcgagcctagcgaggccgagatcagccacacccagaaagccaccctcgtgtgcctggctaccggcttctaccccgaccatgtggaactgtcttggtgggtcaacggcaaagaggtgcacagcggcgtgtgtaccgacccccagccactgaaagaacagcccgccctgaacgacagccggtactgcctgagcagcagactgagagtgtccgccaccttctggcagaacccccggaaccacttcagatgccaggtgcagttctacggcctgagcgagaacgacgagtggacccaggacagagccaagcccgtgacccagatcgtgtctgccgaagcctggggcagagccgattgcggctttaccagcgagagctaccagcagggcgtgctgagcgccaccatcctgtacgagatcctgctgggcaaggccaccctgtacgccgtgctggtgtctgccctggtgctgatggctatggtcaagcggaaggacagccggggaagggccaagcgatctggatctggagcaacaaacttctcactactcaaacaagcaggtgacgtggaggagaatcccgggccttctagaatgtaccggatgcagctgctgagctgtatcgccctgtctctggccctggtcacaaatagcaactgggttaacgtgatctccgacctgaagaagatcgaggacctgatccagtccatgcacatcgacgccacactgtacaccgagagcgacgtgcaccctagctgtaaagtgaccgccatgaagtgctttctgctggaactgcaagtgatctccctggaaagcggcgacgccagcatccacgacaccgtgaagaacctgattatcctggctaacaacagcctgagcagcaacggcaacgtgaccgagtccggctgtaaagagtgcgaggaactggaagagaagaatatcaaagagttcctccagagcttcgtgcacatcgtgcagatgttcatcaacaccagcaagatcgaagtgatgtaccctcctccttacctggacaacgagaagtccaacggcaccatcatccacgtgaagggcaagcacctgtgtccttctccactgttccccggacctagcaagcctttctgggtgctcgttgttgttggcggcgtgctggcctgttacagcctgctggttaccgtggccttcatcatcttttgggtccgaagcaagcggagctaa

SEQ ID NO: 8877 - DNA, 2652 bp, synthetic construct
  source 1..2652: mol_type = other DNA
atggccttaccagtgaccgccttgctcctgccgctggccttgctgctccacgccgccaggccggaagttcagctggttcagagcggagccgaagtgaagaagcctggcgagagcctgaagattagctgcaaaggcagcggctacggcttcaccagctattggatcggctgggtccgacagatgcctggcaaaggactggaatggatgggcatcattcaccccgacgacagcgacaccaagtacagccctagcttccagggccaagtgaccatcagcgccgacaagagcatcagcacagcctacctccagtggtcctctctgaaggccagcgataccgccatgtactactgcgccagcagctacctgagaggactgtggggcggctacttcgatttttggggccagggcacactggtcaccgttagttctctcgaggacctgaagaacgtgttcccacctgaggtggccgtgttcgagcctagcgaggccgagatcagccacacccagaaagccaccctcgtgtgcctggctaccggcttctaccccgaccatgtggaactgtcttggtgggtcaacggcaaagaggtgcacagcggcgtgtgtaccgacccccagccactgaaagaacagcccgccctgaacgacagccggtactgcctgagcagcagactgagagtgtccgccaccttctggcagaacccccggaaccacttcagatgccaggtgcagttctacggcctgagcgagaacgacgagtggacccaggacagagccaagcccgtgacccagatcgtgtctgccgaagcctggggcagagccgattgcggctttaccagcgagagctaccagcagggcgtgctgagcgccaccatcctgtacgagatcctgctgggcaaggccaccctgtacgccgtgctggtgtctgccctggtgctgatggctatggtcaagcggaaggacagccggggaagggccaagcgatctggatctggagcaacaaacttctcactactcaaacaagcaggtgacgtggaggagaatcccgggcctactagtatggactggatttggcgcatccttttccttgtcggcgctgctaccggcgcgcattccttcgaactgcaaagcgtgctgacacagcctcctagcgcctctggaacacctggacagagagtgacaatcagctgctccggcagctccagcaacatcggcagcaactacgtgaactggtatcagcagctgcctggcacagcccctaaactgctgatctacggcgactaccagaggccaagcggcgtgccagatagattcagcggcagcaagtctggcacaagcgccagcctggctatctctggactgagaagcgaggacgaggccgactactactgtgccaccagagatgatagcctgagcggcagcgtggtgtttggcacaggcacaaagctgacagtgctgggcacgcgtatccagaaccctgatcctgccgtgtaccagctgcgggatagcaagagcagcgacaagagcgtgtgtctgttcaccgacttcgacagccagaccaacgtgtcccagagcaaggactccgacgtgtacatcaccgataagtgcgtgctggacatgcggagcatggacttcaagagcaactccgccgtggcctggtccaacaagtccgatttcgcctgcgccaacgccttcaacaacagcattatccccgaggacacattcttcccaagccccgagagcagctgcgacgtgaagctggtggaaaagagcttcgagacagacaccaacctgaacttccagaacctgagcgtgatcggcttcagaatcctgctgctgaaagtggccggctttaacctgctgatgaccctgcggctgtggtccagccgcgccaagagaagcggatctggcgtgaagcagaccctgaatttcgacctgctgaagctggctggcgacgtggaatccaacccaggcccttctagaaccatgtaccggatgcagctgctgagctgtatcgccctgtctctggccctggtcacaaatagcgcaagaagtgaagatcgctacaggaaccctaaggggtcaggaggaagcaactgggttaacgtgatctccgacctgaagaagatcgaggacctgatccagtccatgcacatcgacgccacactgtacaccgagagcgacgtgcaccctagctgtaaagtgaccgccatgaagtgctttctgctggaactgcaagtgatctccctggaaagcggcgacgccagcatccacgacaccgtgaagaacctgattatcctggctaacaacagcctgagcagcaacggcaacgtgaccgagtccggctgtaaagagtgcgaggaactggaagagaagaatatcaaagagttcctccagagcttcgtgcacatcgtgcagatgttcatcaacaccagcaagatcgaagtgatgtaccctcctccttacctggacaacgagaagtccaacggcaccatcatccacgtgaagggcaagcacctgtgtccttctccactgttccccggacctagcaagcctttctgggtgctcgttgttgttggcggcgtgctggcctgttacagcctgctggttaccgtggccttcatcatcttttgggtccgaagcaagcggagctaa

SEQ ID NO: 8878 - DNA, 2730 bp, synthetic construct
  source 1..2730: mol_type = other DNA
atggccttaccagtgaccgccttgctcctgccgctggccttgctgctccacgccgccaggccggacatccagatgacacagagccctagcagcctgtctgccagcgtgggagacagagtgaccatcacatgcaaggccagcgaccacatcaacaactggctggcctggtatcagcagaagcctggacaggcccctaagctgctgatctacggcgctaccacactggaaacaggcgtgcccagcagattttctggcagcggctctggcaccgactacaccctgacaatatccagcctccagcctgaggacttcgccacctactactgtcagcagagctggaacaccccttggacattcggccagggcaccaagctggaaatcaagagactcgaggacctgaagaacgtgttcccacctgaggtggccgtgttcgagcctagcgaggccgagatcagccacacccagaaagccaccctcgtgtgcctggctaccggcttctaccccgaccatgtggaactgtcttggtgggtcaacggcaaagaggtgcacagcggcgtgtgtaccgacccccagccactgaaagaacagcccgccctgaacgacagccggtactgcctgagcagcagactgagagtgtccgccaccttctggcagaacccccggaaccacttcagatgccaggtgcagttctacggcctgagcgagaacgacgagtggacccaggacagagccaagcccgtgacccagatcgtgtctgccgaagcctggggcagagccgattgcggctttaccagcgagagctaccagcagggcgtgctgagcgccaccatcctgtacgagatcctgctgggcaaggccaccctgtacgccgtgctggtgtctgccctggtgctgatggctatggtcaagcggaaggacagccggggaagggccaagcgatctggatctggagcaacaaacttctcactactcaaacaagcaggtgacgtggaggagaatcccgggcctactagtgccaccatggactggatttggcgcatccttttccttgtcggcgctgctaccggcgcccattccgggcccgccagaagcgaggacagatacagaaaccccaaaggatccggcggcggaggatctggcggaggcggatctgggggcggaggctctttcgaacaagttcagcttcaacagcctggcgctgagctggtcaaacctggcgcttctgtgaagatgagctgcaaagccagcggctacgccttcagcagctactggatcaactggatgaagcagaaacccggccagggactcgaatggatcggccaaatctatcccggcgacggcgacaccaactacaacggcaagttcaagggcagagccacactgaccgccgatacctctagcagcacagcctacatgcagctgagcagcctgaccagcgaagatagcgccgtgtacttctgtgcccggtccatcacaacagtcgtgggctgcgctatggactattggggccagggaacaagcgtgaccgtgtctagtacgcgtatccagaaccctgatcctgccgtgtaccagctgcgggatagcaagagcagcgacaagagcgtgtgtctgttcaccgacttcgacagccagaccaacgtgtcccagagcaaggactccgacgtgtacatcaccgataagtgcgtgctggacatgcggagcatggacttcaagagcaactccgccgtggcctggtccaacaagtccgatttcgcctgcgccaacgccttcaacaacagcattatccccgaggacacattcttcccaagccccgagagcagctgcgacgtgaagctggtggaaaagagcttcgagacagacaccaacctgaacttccagaacctgagcgtgatcggcttcagaatcctgctgctgaaagtggccggctttaacctgctgatgaccctgcggctgtggtccagccgcgccaagagaagcggatctggcgtgaagcagaccctgaatttcgacctgctgaagctggctggcgacgtggaatccaacccaggcccttctagaaccatgtaccggatgcagctgctgagctgtatcgccctgtctctggccctggtcacaaatagcgcaagaagtgaagatcgctacaggaaccctaaggggtcaggaggaagcaactgggttaacgtgatctccgacctgaagaagatcgaggacctgatccagtccatgcacatcgacgccacactgtacaccgagagcgacgtgcaccctagctgtaaagtgaccgccatgaagtgctttctgctggaactgcaagtgatctccctggaaagcggcgacgccagcatccacgacaccgtgaagaacctgattatcctggctaacaacagcctgagcagcaacggcaacgtgaccgagtccggctgtaaagagtgcgaggaactggaagagaagaatatcaaagagttcctccagagcttcgtgcacatcgtgcagatgttcatcaacaccagcaagatcgaagtgatgtaccctcctccttacctggacaacgagaagtccaacggcaccatcatccacgtgaagggcaagcacctgtgtccttctccactgttccccggacctagcaagcctttctgggtgctcgttgttgttggcggcgtgctggcctgttacagcctgctggttaccgtggccttcatcatcttttgggtccgaagcaagcggagctaa

SEQ ID NO: 8879 - DNA, 2823 bp, synthetic construct
  source 1..2823: mol_type = other DNA
atggccttaccagtgaccgccttgctcctgccgctggccttgctgctccacgccgccaggccggacatccagatgacacagagccctagcagcctgtctgccagcgtgggagacagagtgaccatcacatgcaaggccagcgaccacatcaacaactggctggcctggtatcagcagaagcctggacaggcccctaagctgctgatctacggcgctaccacactggaaacaggcgtgcccagcagattttctggcagcggctctggcaccgactacaccctgacaatatccagcctccagcctgaggacttcgccacctactactgtcagcagagctggaacaccccttggacattcggccagggcaccaagctggaaatcaagagactcgagatccagaaccctgatcctgccgtgtaccagctgcgggatagcaagagcagcgacaagagcgtgtgtctgttcaccgacttcgacagccagaccaacgtgtcccagagcaaggactccgacgtgtacatcaccgataagtgcgtgctggacatgcggagcatggacttcaagagcaactccgccgtggcctggtccaacaagtccgatttcgcctgcgccaacgccttcaacaacagcattatccccgaggacacattcttcccaagccccgagagcagctgcgacgtgaagctggtggaaaagagcttcgagacagacaccaacctgaacttccagaacctgagcgtgatcggcttcagaatcctgctgctgaaagtggccggctttaacctgctgatgaccctgcggctgtggtccagctctagtcgcgccaagagaagcggatctggcgtgaagcagaccctgaatttcgacctgctgaagctggctggcgacgtggaatccaacccaggccctactagtatggactggatttggcgcatccttttccttgtcggcgctgctaccggcgcgcattccttcgaacaagttcagcttcaacagcctggcgctgagctggtcaaacctggcgcttctgtgaagatgagctgcaaagccagcggctacgccttcagcagctactggatcaactggatgaagcagaaacccggccagggactcgaatggatcggccaaatctatcccggcgacggcgacaccaactacaacggcaagttcaagggcagagccacactgaccgccgatacctctagcagcacagcctacatgcagctgagcagcctgaccagcgaagatagcgccgtgtacttctgtgcccggtccatcacaacagtcgtgggctgcgctatggactattggggccagggaacaagcgtgaccgtgtctagtacgcgtgaggacctgaagaacgtgttcccacctgaggtggccgtgttcgagcctagcgaggccgagatcagccacacccagaaagccaccctcgtgtgcctggctaccggcttctaccccgaccatgtggaactgtcttggtgggtcaacggcaaagaggtgcacagcggcgtgtgtaccgacccccagccactgaaagaacagcccgccctgaacgacagccggtactgcctgagcagcagactgagagtgtccgccaccttctggcagaacccccggaaccacttcagatgccaggtgcagttctacggcctgagcgagaacgacgagtggacccaggacagagccaagcccgtgacccagatcgtgtctgccgaagcctggggcagagccgattgcggctttaccagcgagagctaccagcagggcgtgctgagcgccaccatcctgtacgagatcctgctgggcaaggccaccctgtacgccgtgctggtgtctgccctggtgctgatggctatggtcaagcggaaggacagccggggaagggccaagcgatctggatctggagcaacaaacttctcactactcaaacaagcaggtgacgtggaggagaatcccgggccttctagaatggccctgcctgtgacagctctgctgctgcctctggcactgctgctgcacgccgccagacctgcaagaagtgaagatcgctacaggaaccctaaggggtcaggaggaagcgaacttcctacacagggcaccttcagcaacgtgtccaccaatgtgtccccagccaagcctaccaccaccgcctgcgcacgcagcgaggacaggtataggaaccccaaaggaagtggcggatctgcccctaccagcagcagcaccaagaaaacccagctgcaactggaacacctcctgctggacctccagatgatcctgaacggcatcaacaactacaagaaccccaagctgacccggatgctgaccttcaagttctacatgcccaagaaggccaccgagctgaagcacctccagtgcctggaagaggaactgaagcccctggaagaagtgctgaatctggcccagagcaagaacttccacctgaggccaagggacctgatctccaacatcaacgtgatcgtgctggaactgaaaggcagcgagacaaccttcatgtgcgagtacgccgacgagacagctaccatcgtggaatttctgaatcggtggatcaccttctgccagagcatcatcagcaccctgacagccaagcctacaacaacccctgctcctagacctcctacaccagctcctacaatcgccagccagcctctgtctctcagacccgaagcctgtagaccagctgctggcggagctgtgcataccagaggactggatttcgcctgcgacatctacatctgggctcctctggctggcacatgtggcgttctgctgctgtccctggtcatcaccctgtactgttaa

SEQ ID NO: 8880 - DNA, 2700 bp, synthetic construct
  source 1..2700: mol_type = other DNA
atggccttaccagtgaccgccttgctcctgccgctggccttgctgctccacgccgccaggccggacatccagatgacacagagccctagcagcctgtctgccagcgtgggagacagagtgaccatcacatgcaaggccagcgaccacatcaacaactggctggcctggtatcagcagaagcctggacaggcccctaagctgctgatctacggcgctaccacactggaaacaggcgtgcccagcagattttctggcagcggctctggcaccgactacaccctgacaatatccagcctccagcctgaggacttcgccacctactactgtcagcagagctggaacaccccttggacattcggccagggcaccaagctggaaatcaagagactcgagatccagaaccctgatcctgccgtgtaccagctgcgggatagcaagagcagcgacaagagcgtgtgtctgttcaccgacttcgacagccagaccaacgtgtcccagagcaaggactccgacgtgtacatcaccgataagtgcgtgctggacatgcggagcatggacttcaagagcaactccgccgtggcctggtccaacaagtccgatttcgcctgcgccaacgccttcaacaacagcattatccccgaggacacattcttcccaagccccgagagcagctgcgacgtgaagctggtggaaaagagcttcgagacagacaccaacctgaacttccagaacctgagcgtgatcggcttcagaatcctgctgctgaaagtggccggctttaacctgctgatgaccctgcggctgtggtccagctctagtcgcgccaagagaagcggatctggcgtgaagcagaccctgaatttcgacctgctgaagctggctggcgacgtggaatccaacccaggccctactagtatggactggatttggcgcatccttttccttgtcggcgctgctaccggcgcgcattccttcgaacaagttcagcttcaacagcctggcgctgagctggtcaaacctggcgcttctgtgaagatgagctgcaaagccagcggctacgccttcagcagctactggatcaactggatgaagcagaaacccggccagggactcgaatggatcggccaaatctatcccggcgacggcgacaccaactacaacggcaagttcaagggcagagccacactgaccgccgatacctctagcagcacagcctacatgcagctgagcagcctgaccagcgaagatagcgccgtgtacttctgtgcccggtccatcacaacagtcgtgggctgcgctatggactattggggccagggaacaagcgtgaccgtgtctagtacgcgtgaggacctgaagaacgtgttcccacctgaggtggccgtgttcgagcctagcgaggccgagatcagccacacccagaaagccaccctcgtgtgcctggctaccggcttctaccccgaccatgtggaactgtcttggtgggtcaacggcaaagaggtgcacagcggcgtgtgtaccgacccccagccactgaaagaacagcccgccctgaacgacagccggtactgcctgagcagcagactgagagtgtccgccaccttctggcagaacccccggaaccacttcagatgccaggtgcagttctacggcctgagcgagaacgacgagtggacccaggacagagccaagcccgtgacccagatcgtgtctgccgaagcctggggcagagccgattgcggctttaccagcgagagctaccagcagggcgtgctgagcgccaccatcctgtacgagatcctgctgggcaaggccaccctgtacgccgtgctggtgtctgccctggtgctgatggctatggtcaagcggaaggacagccggggaagggccaagcgatctggatctggagcaacaaacttctcactactcaaacaagcaggtgacgtggaggagaatcccgggccttctagaatggccctgcctgtgacagctctgctgctgcctctggcactgctgctgcacgccgccagacctgcaagaagtgaagatcgctacaggaaccctaaggggtcaggaggaagcgcccctaccagcagcagcaccaagaaaacccagctgcaactggaacacctcctgctggacctccagatgatcctgaacggcatcaacaactacaagaaccccaagctgacccggatgctgaccttcaagttctacatgcccaagaaggccaccgagctgaagcacctccagtgcctggaagaggaactgaagcccctggaagaagtgctgaatctggcccagagcaagaacttccacctgaggccaagggacctgatctccaacatcaacgtgatcgtgctggaactgaaaggcagcgagacaaccttcatgtgcgagtacgccgacgagacagctaccatcgtggaatttctgaatcggtggatcaccttctgccagagcatcatcagcaccctgacagccaagcctacaacaacccctgctcctagacctcctacaccagctcctacaatcgccagccagcctctgtctctcagacccgaagcctgtagaccagctgctggcggagctgtgcataccagaggactggatttcgcctgcgacatctacatctgggctcctctggctggcacatgtggcgttctgctgctgtccctggtcatcaccctgtactgttaa

SEQ ID NO: 8881 - DNA, 2643 bp, synthetic construct
  source 1..2643: mol_type = other DNA
atggccttaccagtgaccgccttgctcctgccgctggccttgctgctccacgccgccaggccggacatccagatgacacagagccctagcagcctgtctgccagcgtgggagacagagtgaccatcacatgcaaggccagcgaccacatcaacaactggctggcctggtatcagcagaagcctggacaggcccctaagctgctgatctacggcgctaccacactggaaacaggcgtgcccagcagattttctggcagcggctctggcaccgactacaccctgacaatatccagcctccagcctgaggacttcgccacctactactgtcagcagagctggaacaccccttggacattcggccagggcaccaagctggaaatcaagagactcgagatccagaaccctgatcctgccgtgtaccagctgcgggatagcaagagcagcgacaagagcgtgtgtctgttcaccgacttcgacagccagaccaacgtgtcccagagcaaggactccgacgtgtacatcaccgataagtgcgtgctggacatgcggagcatggacttcaagagcaactccgccgtggcctggtccaacaagtccgatttcgcctgcgccaacgccttcaacaacagcattatccccgaggacacattcttcccaagccccgagagcagctgcgacgtgaagctggtggaaaagagcttcgagacagacaccaacctgaacttccagaacctgagcgtgatcggcttcagaatcctgctgctgaaagtggccggctttaacctgctgatgaccctgcggctgtggtccagctctagtcgcgccaagagaagcggatctggcgtgaagcagaccctgaatttcgacctgctgaagctggctggcgacgtggaatccaacccaggccctactagtatggactggatttggcgcatccttttccttgtcggcgctgctaccggcgcgcattccttcgaacaagttcagcttcaacagcctggcgctgagctggtcaaacctggcgcttctgtgaagatgagctgcaaagccagcggctacgccttcagcagctactggatcaactggatgaagcagaaacccggccagggactcgaatggatcggccaaatctatcccggcgacggcgacaccaactacaacggcaagttcaagggcagagccacactgaccgccgatacctctagcagcacagcctacatgcagctgagcagcctgaccagcgaagatagcgccgtgtacttctgtgcccggtccatcacaacagtcgtgggctgcgctatggactattggggccagggaacaagcgtgaccgtgtctagtacgcgtgaggacctgaagaacgtgttcccacctgaggtggccgtgttcgagcctagcgaggccgagatcagccacacccagaaagccaccctcgtgtgcctggctaccggcttctaccccgaccatgtggaactgtcttggtgggtcaacggcaaagaggtgcacagcggcgtgtgtaccgacccccagccactgaaagaacagcccgccctgaacgacagccggtactgcctgagcagcagactgagagtgtccgccaccttctggcagaacccccggaaccacttcagatgccaggtgcagttctacggcctgagcgagaacgacgagtggacccaggacagagccaagcccgtgacccagatcgtgtctgccgaagcctggggcagagccgattgcggctttaccagcgagagctaccagcagggcgtgctgagcgccaccatcctgtacgagatcctgctgggcaaggccaccctgtacgccgtgctggtgtctgccctggtgctgatggctatggtcaagcggaaggacagccggggaagggccaagcgatctggatctggagcaacaaacttctcactactcaaacaagcaggtgacgtggaggagaatcccgggccttctagaaccatgtaccggatgcagctgctgagctgtatcgccctgtctctggccctggtcacaaatagcgcaagaagtgaagatcgctacaggaaccctaaggggtcaggaggaagcaactgggttaacgtgatctccgacctgaagaagatcgaggacctgatccagtccatgcacatcgacgccacactgtacaccgagagcgacgtgcaccctagctgtaaagtgaccgccatgaagtgctttctgctggaactgcaagtgatctccctggaaagcggcgacgccagcatccacgacaccgtgaagaacctgattatcctggctaacaacagcctgagcagcaacggcaacgtgaccgagtccggctgtaaagagtgcgaggaactggaagagaagaatatcaaagagttcctccagagcttcgtgcacatcgtgcagatgttcatcaacaccagcaagatcgaagtgatgtaccctcctccttacctggacaacgagaagtccaacggcaccatcatccacgtgaagggcaagcacctgtgtccttctccactgttccccggacctagcaagcctttctgggtgctcgttgttgttggcggcgtgctggcctgttacagcctgctggttaccgtggccttcatcatcttttgggtccgaagcaagcggagctaa

SEQ ID NO: 8882 - DNA, 2691 bp, synthetic construct
  source 1..2691: mol_type = other DNA
atggccttaccagtgaccgccttgctcctgccgctggccttgctgctccacgccgccaggccggaagtgcagctggttgaatctggcggaggactggttcaggctggcggatctctgagactgtcttgtgccgccagcggcagaacctttagcatgggctggtttagacaggcccctggcaaagagagagagttcgtcgccgccatcacatactctggcggcagcccttactacgccgactctgtgaagggcagattcaccatcagccgggacaacgccaagaacaccgtgtacctccagatgaacagcctgaagcctgaggacaccgccgtgtactactgcgccgccaatccaacatacggcagcgactggaacgccgagaattggggccagggaacccaagtgacagtgtctagcggtaccgcaagaagtgaagatcgctacaggaaccctaaggggtcagaattcgacatccagatgacacagagccctagcagcctgtctgccagcgtgggagacagagtgaccatcacatgcaaggccagcgaccacatcaacaactggctggcctggtatcagcagaagcctggacaggcccctaagctgctgatctacggcgctaccacactggaaacaggcgtgcccagcagattttctggcagcggctctggcaccgactacaccctgacaatatccagcctccagcctgaggacttcgccacctactactgtcagcagagctggaacaccccttggacattcggccagggcaccaagctggaaatcaagagactcgaggacctgaagaacgtgttcccacctgaggtggccgtgttcgagcctagcgaggccgagatcagccacacccagaaagccaccctcgtgtgcctggctaccggcttctaccccgaccatgtggaactgtcttggtgggtcaacggcaaagaggtgcacagcggcgtgtgtaccgacccccagccactgaaagaacagcccgccctgaacgacagccggtactgcctgagcagcagactgagagtgtccgccaccttctggcagaacccccggaaccacttcagatgccaggtgcagttctacggcctgagcgagaacgacgagtggacccaggacagagccaagcccgtgacccagatcgtgtctgccgaagcctggggcagagccgattgcggctttaccagcgagagctaccagcagggcgtgctgagcgccaccatcctgtacgagatcctgctgggcaaggccaccctgtacgccgtgctggtgtctgccctggtgctgatggctatggtcaagcggaaggacagccggggaagggccaagcgatctggatctggagcaacaaacttctcactactcaaacaagcaggtgacgtggaggagaatcccgggcctactagtgccaccatggactggatttggcgcatccttttccttgtcggcgctgctaccggcgcccattccgggccccagctccagctgcaagagtctggacctggcctggtcaagcctagcgagacactgagcctgacctgtaccgtgtccggcgatagcatcagcagcggcgattactactggggctggatcagacagcctcctggcaaaggactggaatggatcggccacatctactacagcggcatcacctactacaaccccagcctgaagtccagagtgaccatcagcgtggacaccagccggaaccagttctccctgaagctgtctagcgtgacagccgccgataccgccgtgtactactgcaccagagaggacagcagcaactggcggagtagaggccagggaacactggtcacagttagctctggatccggcggcggaggatctggcggaggcggatctgggggcggaggctctttcgaacaagttcagcttcaacagcctggcgctgagctggtcaaacctggcgcttctgtgaagatgagctgcaaagccagcggctacgccttcagcagctactggatcaactggatgaagcagaaacccggccagggactcgaatggatcggccaaatctatcccggcgacggcgacaccaactacaacggcaagttcaagggcagagccacactgaccgccgatacctctagcagcacagcctacatgcagctgagcagcctgaccagcgaagatagcgccgtgtacttctgtgcccggtccatcacaacagtcgtgggctgcgctatggactattggggccagggaacaagcgtgaccgtgtctagtacgcgtatccagaaccctgatcctgccgtgtaccagctgcgggatagcaagagcagcgacaagagcgtgtgtctgttcaccgacttcgacagccagaccaacgtgtcccagagcaaggactccgacgtgtacatcaccgataagtgcgtgctggacatgcggagcatggacttcaagagcaactccgccgtggcctggtccaacaagtccgatttcgcctgcgccaacgccttcaacaacagcattatccccgaggacacattcttcccaagccccgagagcagctgcgacgtgaagctggtggaaaagagcttcgagacagacaccaacctgaacttccagaacctgagcgtgatcggcttcagaatcctgctgctgaaagtggccggctttaacctgctgatgaccctgcggctgtggtccagctaa

SEQ ID NO: 8883 - DNA, 2565 bp, synthetic construct
  source 1..2565: mol_type = other DNA
atggccttaccagtgaccgccttgctcctgccgctggccttgctgctccacgccgccaggccggacatccagttgacccagtcccccagctcactcagcgccagtgtgggggaccgggtgaccattacctgtaaagccagtcagagtgtggactatgacggggatagcttcctgaattggtatcagcagaagcctggcaaagccccaaagctgctgatctacgctgcatctaatctggagtcaggcgtgccttccaggttctccggtagtgggtctgggaccgatttcacattgaccatttcatccctccaacccgaggatttcgctacatattactgtcagcagtccaatgaggaccctctcacctttggccagggcaccaaagttgaaattaagagactcgaggacctgaagaacgtgttcccacctgaggtggccgtgttcgagcctagcgaggccgagatcagccacacccagaaagccaccctcgtgtgcctggctaccggcttctaccccgaccatgtggaactgtcttggtgggtcaacggcaaagaggtgcacagcggcgtgtgtaccgacccccagccactgaaagaacagcccgccctgaacgacagccggtactgcctgagcagcagactgagagtgtccgccaccttctggcagaacccccggaaccacttcagatgccaggtgcagttctacggcctgagcgagaacgacgagtggacccaggacagagccaagcccgtgacccagatcgtgtctgccgaagcctggggcagagccgattgcggctttaccagcgagagctaccagcagggcgtgctgagcgccaccatcctgtacgagatcctgctgggcaaggccaccctgtacgccgtgctggtgtctgccctggtgctgatggctatggtcaagcggaaggacagccggggaagggccaagcgatctggatctggagcaacaaacttctcactactcaaacaagcaggtgacgtggaggagaatcccgggcctactagtatggactggatttggcgcatccttttccttgtcggcgctgctaccggcgcgcattccttcgcagtccaacttgtggagtctggagggggcctggtgcagcccggcggctctctcagactgtcttgtgcggcaagcggctacaccttcagctcttactggatagaatgggtgaggcaggcacctggaaagggactggagtggattggagagattctgccaggagggggagatacaaattacaatgaaatcttcaaggggcgggccaccttttcagcggataccagcaagaatacagcttacctgcagatgaatagcctccgggcagaagataccgctgtttattattgcacgagacgggtgccaataagactggactattgggggcaagggactcttgtcaccgtcagttcaacgcgtatccagaaccctgatcctgccgtgtaccagctgcgggatagcaagagcagcgacaagagcgtgtgtctgttcaccgacttcgacagccagaccaacgtgtcccagagcaaggactccgacgtgtacatcaccgataagtgcgtgctggacatgcggagcatggacttcaagagcaactccgccgtggcctggtccaacaagtccgatttcgcctgcgccaacgccttcaacaacagcattatccccgaggacacattcttcccaagccccgagagcagctgcgacgtgaagctggtggaaaagagcttcgagacagacaccaacctgaacttccagaacctgagcgtgatcggcttcagaatcctgctgctgaaagtggccggctttaacctgctgatgaccctgcggctgtggtccagccgcgccaagagaagcggatctggcgtgaagcagaccctgaatttcgacctgctgaagctggctggcgacgtggaatccaacccaggcccttctagaggccatatgaccgagtacaagcccacggtgcgcctcgccacccgcgacgacgtccccagggccgtacgcaccctcgccgccgcgttcgccgactaccccgccacgcgccacaccgtcgatccggaccgccacatcgagcgggtcaccgagctgcaagaactcttcctcacgcgcgtcgggctcgacatcggcaaggtgtgggtcgcggacgacggcgccgcggtggcggtctggaccacgccggagagcgtcgaagcgggggcggtgttcgccgagatcggcccgcgcatggccgagttgagcggttcccggctggccgcgcagcaacagatggaaggcctcctggcgccgcaccggcccaaggagcccgcgtggttcctggccaccgtcggcgtctcgcccgaccaccagggcaagggtctgggcagcgccgtcgtgctccccggagtggaggcggccgagcgcgccggggtgcccgccttcctggagacctccgcgccccgcaacctccccttctacgagcggctcggcttcaccgtcaccgccgacgtcgaggtgcccgaaggaccgcgcacctggtgcatgacccgcaagcccggtgcctga

SEQ ID NO: 8884 - DNA, 2565 bp, synthetic construct
  source 1..2565: mol_type = other DNA
atggccttaccagtgaccgccttgctcctgccgctggccttgctgctccacgccgccaggccggacatccagttgacccagtcccccagctcactcagcgccagtgtgggggaccgggtgaccattacctgtaaagccagtcagagtgtggactatgacggggatagcttcctgaattggtatcagcagaagcctggcaaagccccaaagctgctgatctacgctgcatctaatctggagtcaggcgtgccttccaggttctccggtagtgggtctgggaccgatttcacattgaccatttcatccctccaacccgaggatttcgctacatattactgtcagcagtccaatgaggaccctctcacctttggccagggcaccaaagttgaaattaagagactcgaggacctgaagaacgtgttcccacctgaggtggccgtgttcgagcctagcgaggccgagatcagccacacccagaaagccaccctcgtgtgcctggctaccggcttctaccccgaccatgtggaactgtcttggtgggtcaacggcaaagaggtgcacagcggcgtgtgtaccgacccccagccactgaaagaacagcccgccctgaacgacagccggtactgcctgagcagcagactgagagtgtccgccaccttctggcagaacccccggaaccacttcagatgccaggtgcagttctacggcctgagcgagaacgacgagtggacccaggacagagccaagcccgtgacccagatcgtgtctgccgaagcctggggcagagccgattgcggctttaccagcgagagctaccagcagggcgtgctgagcgccaccatcctgtacgagatcctgctgggcaaggccaccctgtacgccgtgctggtgtctgccctggtgctgatggctatggtcaagcggaaggacagccggggaagggccaagcgatctggatctggagcaacaaacttctcactactcaaacaagcaggtgacgtggaggagaatcccgggcctactagtatggactggatttggcgcatccttttccttgtcggcgctgctaccggcgcgcattccttcgaagtccaacttgtggagtctggagggggcctggtgcagcccggcggctctctcagactgtcttgtgcggcaagcggctacaccttcagctcttactggatagaatgggtgaggcaggcacctggaaagggactggagtggattggagagattctgccaggagggggagatacaaattacaatgaaatcttcaaggggcgggccaccttttcagcggataccagcaagaatacagcttacctgcagatgaatagcctccgggcagaagataccgctgtttattattgcacgagacgggtgccaataagactggactattgggggcaagggactcttgtcaccgtcagttcaacgcgtatccagaaccctgatcctgccgtgtaccagctgcgggatagcaagagcagcgacaagagcgtgtgtctgttcaccgacttcgacagccagaccaacgtgtcccagagcaaggactccgacgtgtacatcaccgataagtgcgtgctggacatgcggagcatggacttcaagagcaactccgccgtggcctggtccaacaagtccgatttcgcctgcgccaacgccttcaacaacagcattatccccgaggacacattcttcccaagccccgagagcagctgcgacgtgaagctggtggaaaagagcttcgagacagacaccaacctgaacttccagaacctgagcgtgatcggcttcagaatcctgctgctgaaagtggccggctttaacctgctgatgaccctgcggctgtggtccagccgcgccaagagaagcggatctggcgtgaagcagaccctgaatttcgacctgctgaagctggctggcgacgtggaatccaacccaggcccttctagaggccatatgaccgagtacaagcccacggtgcgcctcgccacccgcgacgacgtccccagggccgtacgcaccctcgccgccgcgttcgccgactaccccgccacgcgccacaccgtcgatccggaccgccacatcgagcgggtcaccgagctgcaagaactcttcctcacgcgcgtcgggctcgacatcggcaaggtgtgggtcgcggacgacggcgccgcggtggcggtctggaccacgccggagagcgtcgaagcgggggcggtgttcgccgagatcggcccgcgcatggccgagttgagcggttcccggctggccgcgcagcaacagatggaaggcctcctggcgccgcaccggcccaaggagcccgcgtggttcctggccaccgtcggcgtctcgcccgaccaccagggcaagggtctgggcagcgccgtcgtgctccccggagtggaggcggccgagcgcgccggggtgcccgccttcctggagacctccgcgccccgcaacctccccttctacgagcggctcggcttcaccgtcaccgccgacgtcgaggtgcccgaaggaccgcgcacctggtgcatgacccgcaagcccggtgcctga

SEQ ID NO: 8885 - DNA, 2565 bp, synthetic construct
  source 1..2565: mol_type = other DNA
atggccttaccagtgaccgccttgctcctgccgctggccttgctgctccacgccgccaggccggacatccagttgacccagtcccccagctcactcagcgccagtgtgggggaccgggtgaccattacctgtaaagccagtcagagtgtggactatgacggggatagcttcctgaattggtatcagcagaagcctggcaaagccccaaagctgctgatctacgctgcatctaatctggagtcaggcgtgccttccaggttctccggtagtgggtctgggaccgatttcacattgaccatttcatccctccaacccgaggatttcgctacatattactgtcagcagtccaatgaggaccctctcacctttggccagggcaccaaagttgaaattaagagactcgaggacctgaagaacgtgttcccacctgaggtggccgtgttcgagcctagcgaggccgagatcagccacacccagaaagccaccctcgtgtgcctggctaccggcttctaccccgaccatgtggaactgtcttggtgggtcaacggcaaagaggtgcacagcggcgtgtgtaccgacccccagccactgaaagaacagcccgccctgaacgacagccggtactgcctgagcagcagactgagagtgtccgccaccttctggcagaacccccggaaccacttcagatgccaggtgcagttctacggcctgagcgagaacgacgagtggacccaggacagagccaagcccgtgacccagatcgtgtctgccgaagcctggggcagagccgattgcggctttaccagcgagagctaccagcagggcgtgctgagcgccaccatcctgtacgagatcctgctgggcaaggccaccctgtacgccgtgctggtgtctgccctggtgctgatggctatggtcaagcggaaggacagccggggaagggccaagcgatctggatctggagcaacaaacttctcactactcaaacaagcaggtgacgtggaggagaatcccgggcctactagtatggactggatttggcgcatccttttccttgtcggcgctgctaccggcgcgcattccttcgaagtccaacttgtggagtctggagggggcctggtgcagcccggcggctctctcagactgtcttgtgcggcaagcggctacaccttcacctcttactggatagaatgggtgaggcaggcacctggaaagggactggagtggattggagagattctgccaggagggggagatacaaattacaatgaaatcttcaaggggcgggccaccttttcagcggataccagcaagaatacagcttacctgcagatgaatagcctccgggcagaagataccgctgtttattattgcacgagacgggtgccaataagactggactattgggggcaagggactcttgtcaccgtcagttcaacgcgtatccagaaccctgatcctgccgtgtaccagctgcgggatagcaagagcagcgacaagagcgtgtgtctgttcaccgacttcgacagccagaccaacgtgtcccagagcaaggactccgacgtgtacatcaccgataagtgcgtgctggacatgcggagcatggacttcaagagcaactccgccgtggcctggtccaacaagtccgatttcgcctgcgccaacgccttcaacaacagcattatccccgaggacacattcttcccaagccccgagagcagctgcgacgtgaagctggtggaaaagagcttcgagacagacaccaacctgaacttccagaacctgagcgtgatcggcttcagaatcctgctgctgaaagtggccggctttaacctgctgatgaccctgcggctgtggtccagccgcgccaagagaagcggatctggcgtgaagcagaccctgaatttcgacctgctgaagctggctggcgacgtggaatccaacccaggcccttctagaggccatatgaccgagtacaagcccacggtgcgcctcgccacccgcgacgacgtccccagggccgtacgcaccctcgccgccgcgttcgccgactaccccgccacgcgccacaccgtcgatccggaccgccacatcgagcgggtcaccgagctgcaagaactcttcctcacgcgcgtcgggctcgacatcggcaaggtgtgggtcgcggacgacggcgccgcggtggcggtctggaccacgccggagagcgtcgaagcgggggcggtgttcgccgagatcggcccgcgcatggccgagttgagcggttcccggctggccgcgcagcaacagatggaaggcctcctggcgccgcaccggcccaaggagcccgcgtggttcctggccaccgtcggcgtctcgcccgaccaccagggcaagggtctgggcagcgccgtcgtgctccccggagtggaggcggccgagcgcgccggggtgcccgccttcctggagacctccgcgccccgcaacctccccttctacgagcggctcggcttcaccgtcaccgccgacgtcgaggtgcccgaaggaccgcgcacctggtgcatgacccgcaagcccggtgcctga

SEQ ID NO: 8886 - DNA, 2280 bp, synthetic construct
  source 1..2280: mol_type = other DNA
atggccttaccagtgaccgccttgctcctgccgctggccttgctgctccacgccgccaggccggaagtgcagctggttgaatctggcggaggactggttcaggctggcggatctctgagactgtcttgtgccgccagcggcagaacctttagcatgggctggtttagacaggcccctggcaaagagagagagttcgtcgccgccatcacatactctggcggcagcccttactacgccgactctgtgaagggcagattcaccatcagccgggacaacgccaagaacaccgtgtacctccagatgaacagcctgaagcctgaggacaccgccgtgtactactgcgccgccaatccaacatacggcagcgactggaacgccgagaattggggccagggaacccaagtgacagtgtctagcggtaccggcggaggcggatctggcggcggaggtagcggtggcggaggatctgaattcgacatccagttgacccagtcccccagctcactcagcgccagtgtgggggaccgggtgaccattacctgtaaagccagtcagagtgtggactatgacggggatagcttcctgaattggtatcagcagaagcctggcaaagccccaaagctgctgatctacgctgcatctaatctggagtcaggcgtgccttccaggttctccggtagtgggtctgggaccgatttcacattgaccatttcatccctccaacccgaggatttcgctacatattactgtcagcagtccaatgaggaccctctcacctttggccagggcaccaaagttgaaattaagagactcgaggacctgaagaacgtgttcccacctgaggtggccgtgttcgagcctagcgaggccgagatcagccacacccagaaagccaccctcgtgtgcctggctaccggcttctaccccgaccatgtggaactgtcttggtgggtcaacggcaaagaggtgcacagcggcgtgtgtaccgacccccagccactgaaagaacagcccgccctgaacgacagccggtactgcctgagcagcagactgagagtgtccgccaccttctggcagaacccccggaaccacttcagatgccaggtgcagttctacggcctgagcgagaacgacgagtggacccaggacagagccaagcccgtgacccagatcgtgtctgccgaagcctggggcagagccgattgcggctttaccagcgagagctaccagcagggcgtgctgagcgccaccatcctgtacgagatcctgctgggcaaggccaccctgtacgccgtgctggtgtctgccctggtgctgatggctatggtcaagcggaaggacagccggggaagggccaagcgatctggatctggagcaacaaacttctcactactcaaacaagcaggtgacgtggaggagaatcccgggcctactagtatggactggatttggcgcatccttttccttgtcggcgctgctaccggcgcgcattccttcgaagaagtccaacttgtggagtctggagggggcctggtgcagcccggcggctctctcagactgtcttgtgcggcaagcggctacaccttcacctcttactggatagaatgggtgaggcaggcacctggaaagggactggagtggattggagagattctgccaggagggggagatacaaattacaatgaaatcttcaaggggcgggccaccttttcagcggataccagcaagaatacagcttacctgcagatgaatagcctccgggcagaagataccgctgtttattattgcacgagacgggtgccaataagactggactattgggggcaagggactcttgtcaccgtcagttcaacgcgtatccagaaccctgatcctgccgtgtaccagctgcgggatagcaagagcagcgacaagagcgtgtgtctgttcaccgacttcgacagccagaccaacgtgtcccagagcaaggactccgacgtgtacatcaccgataagtgcgtgctggacatgcggagcatggacttcaagagcaactccgccgtggcctggtccaacaagtccgatttcgcctgcgccaacgccttcaacaacagcattatccccgaggacacattcttcccaagccccgagagcagctgcgacgtgaagctggtggaaaagagcttcgagacagacaccaacctgaacttccagaacctgagcgtgatcggcttcagaatcctgctgctgaaagtggccggctttaacctgctgatgaccctgcggctgtggtccagctaa

SEQ ID NO: 8887 - DNA, 2697 bp, synthetic construct
  source 1..2697: mol_type = other DNA
atggccttaccagtgaccgccttgctcctgccgctggccttgctgctccacgccgccaggccggaagtgcagctggttgaatctggcggaggactggttcaggctggcggatctctgagactgtcttgtgccgccagcggcagaacctttagcatgggctggtttagacaggcccctggcaaagagagagagttcgtcgccgccatcacatactctggcggcagcccttactacgccgactctgtgaagggcagattcaccatcagccgggacaacgccaagaacaccgtgtacctccagatgaacagcctgaagcctgaggacaccgccgtgtactactgcgccgccaatccaacatacggcagcgactggaacgccgagaattggggccagggaacccaagtgacagtgtctagcggtaccggcggaggcggatctggcggcggaggtagcggtggcggaggatctgaattcgacatccagttgacccagtcccccagctcactcagcgccagtgtgggggaccgggtgaccattacctgtaaagccagtcagagtgtggactatgagggggatagcttcctgaattggtatcagcagaagcctggcaaagccccaaagctgctgatctacgctgcatctaatctggagtcaggcgtgccttctaggttctccggtagtgggtctgggaccgatttcacattgaccatttcatccctccaacccgaggatttcgctacatattactgtcagcagtccaatgaggaccctctcacctttggccagggcaccaaagttgaaattaagagactcgaggacctgaagaacgtgttcccacctgaggtggccgtgttcgagcctagcgaggccgagatcagccacacccagaaagccaccctcgtgtgcctggctaccggcttctaccccgaccatgtggaactgtcttggtgggtcaacggcaaagaggtgcacagcggcgtgtgtaccgacccccagccactgaaagaacagcccgccctgaacgacagccggtactgcctgagcagcagactgagagtgtccgccaccttctggcagaacccccggaaccacttcagatgccaggtgcagttctacggcctgagcgagaacgacgagtggacccaggacagagccaagcccgtgacccagatcgtgtctgccgaagcctggggcagagccgattgcggctttaccagcgagagctaccagcagggcgtgctgagcgccaccatcctgtacgagatcctgctgggcaaggccaccctgtacgccgtgctggtgtctgccctggtgctgatggctatggtcaagcggaaggacagccggggaagggccaagcgatctggatctggagcaacaaacttctcactactcaaacaagcaggtgacgtggaggagaatcccgggcctactagtgccaccatggactggatttggcgcatccttttccttgtcggcgctgctaccggcgcccattccgggcccgaagtgcaactggttgaatccggtggcggcctggtgcaagcaggcggatctctcagacttagctgtgccgcctccggcagaaccttcacaatgggatggtttaggcaggctccagggaaagagagagagttcgtcgccgccatctctctgtctcccacactggcctactacgccgactctgtgaaaggccggttcaccatctccagagataatgccaagaacaccgtggtgctgcaaatgaactctctgaaacccgaggatacagccctgtactattgtgccgctgaccggaagtccgtgatgagcatcagacccgattactggggacagggcacacaagtcacagtgtcctctggatccggcggcggaggatctggcggaggcggatctgggggcggaggctctttcgaagaagtccaacttgtggagtctggagggggcctggtgcagcccggcggctctctcagactgtcttgtgcggcaagcggctacaccttcagctcttactggatagaatgggtgaggcaggcacctggaaagggactggagtggattggagagattctgccaggagggggagatacaaattacaatgaaatcttcaaggggcgggccaccttttcagcggataccagcaagaatacagcttacctgcagatgaatagcctccgggcagaagataccgctgtttattattgcacgagacgggtgccaataagactggactattgggggcaagggactcttgtcaccgtcagttcaacgcgtatccagaaccctgatcctgccgtgtaccagctgcgggatagcaagagcagcgacaagagcgtgtgtctgttcaccgacttcgacagccagaccaacgtgtcccagagcaaggactccgacgtgtacatcaccgataagtgcgtgctggacatgcggagcatggacttcaagagcaactccgccgtggcctggtccaacaagtccgatttcgcctgcgccaacgccttcaacaacagcattatccccgaggacacattcttcccaagccccgagagcagctgcgacgtgaagctggtggaaaagagcttcgagacagacaccaacctgaacttccagaacctgagcgtgatcggcttcagaatcctgctgctgaaagtggccggctttaacctgctgatgaccctgcggctgtggtccagctaa

SEQ ID NO: 8888 - DNA, 2280 bp, synthetic construct
  source 1..2280: mol_type = other DNA
atggccttaccagtgaccgccttgctcctgccgctggccttgctgctccacgccgccaggccggaagtgcagctggttgaatctggcggaggactggttcaggctggcggatctctgagactgtcttgtgccgccagcggcagaacctttagcatgggctggtttagacaggcccctggcaaagagagagagttcgtcgccgccatcacatactctggcggcagcccttactacgccgactctgtgaagggcagattcaccatcagccgggacaacgccaagaacaccgtgtacctccagatgaacagcctgaagcctgaggacaccgccgtgtactactgcgccgccaatccaacatacggcagcgactggaacgccgagaattggggccagggaacccaagtgacagtgtctagcggtaccggcggaggcggatctggcggcggaggtagcggtggcggaggatctgaattcgacatccagttgacccagtcccccagctcactcagcgccagtgtgggggaccgggtgaccattacctgtaaagccagtcagagtgtggactatgagggggatagcttcctgaattggtatcagcagaagcctggcaaagccccaaagctgctgatctacgctgcatctaatctggagtcaggcgtgccttctaggttctccggtagtgggtctgggaccgatttcacattgaccatttcatccctccaacccgaggatttcgctacatattactgtcagcagtccaatgaggaccctctcacctttggccagggcaccaaagttgaaattaagagactcgaggacctgaagaacgtgttcccacctgaggtggccgtgttcgagcctagcgaggccgagatcagccacacccagaaagccaccctcgtgtgcctggctaccggcttctaccccgaccatgtggaactgtcttggtgggtcaacggcaaagaggtgcacagcggcgtgtgtaccgacccccagccactgaaagaacagcccgccctgaacgacagccggtactgcctgagcagcagactgagagtgtccgccaccttctggcagaacccccggaaccacttcagatgccaggtgcagttctacggcctgagcgagaacgacgagtggacccaggacagagccaagcccgtgacccagatcgtgtctgccgaagcctggggcagagccgattgcggctttaccagcgagagctaccagcagggcgtgctgagcgccaccatcctgtacgagatcctgctgggcaaggccaccctgtacgccgtgctggtgtctgccctggtgctgatggctatggtcaagcggaaggacagccggggaagggccaagcgatctggatctggagcaacaaacttctcactactcaaacaagcaggtgacgtggaggagaatcccgggcctactagtatggactggatttggcgcatccttttccttgtcggcgctgctaccggcgcgcattccttcgaagaagtccaacttgtggagtctggagggggcctggtgcagcccggcggctctctcagactgtcttgtgcggcaagcggctacaccttcagctcttactggatagaatgggtgaggcaggcacctggaaagggactggagtggattggagagattctgccaggagggggagatacaaattacaatgaaatcttcaaggggcgggccaccttttcagcggataccagcaagaatacagcttacctgcagatgaatagcctccgggcagaagataccgctgtttattattgcacgagacgggtgccaataagactggactattgggggcaagggactcttgtcaccgtcagttcaacgcgtatccagaaccctgatcctgccgtgtaccagctgcgggatagcaagagcagcgacaagagcgtgtgtctgttcaccgacttcgacagccagaccaacgtgtcccagagcaaggactccgacgtgtacatcaccgataagtgcgtgctggacatgcggagcatggacttcaagagcaactccgccgtggcctggtccaacaagtccgatttcgcctgcgccaacgccttcaacaacagcattatccccgaggacacattcttcccaagccccgagagcagctgcgacgtgaagctggtggaaaagagcttcgagacagacaccaacctgaacttccagaacctgagcgtgatcggcttcagaatcctgctgctgaaagtggccggctttaacctgctgatgaccctgcggctgtggtccagctaa

SEQ ID NO: 8889 - DNA, 2283 bp, synthetic construct
  source 1..2283: mol_type = other DNA
atggccttaccagtgaccgccttgctcctgccgctggccttgctgctccacgccgccaggccggacatccagttgacccagtcccccagctcactcagcgccagtgtgggggaccgggtgaccattacctgtaaagccagtcagagtgtggactatgagggggatagcttcctgaattggtatcagcagaagcctggcaaagccccaaagctgctgatctacgctgcatctaatctggagtcaggcgtgccttctaggttctccggtagtgggtctgggaccgatttcacattgaccatttcatccctccaacccgaggatttcgctacatattactgtcagcagtccaatgaggaccctctcacctttggccagggcaccaaagttgaaattaagagactcgaggacctgaagaacgtgttcccacctgaggtggccgtgttcgagcctagcgaggccgagatcagccacacccagaaagccaccctcgtgtgcctggctaccggcttctaccccgaccatgtggaactgtcttggtgggtcaacggcaaagaggtgcacagcggcgtgtgtaccgacccccagccactgaaagaacagcccgccctgaacgacagccggtactgcctgagcagcagactgagagtgtccgccaccttctggcagaacccccggaaccacttcagatgccaggtgcagttctacggcctgagcgagaacgacgagtggacccaggacagagccaagcccgtgacccagatcgtgtctgccgaagcctggggcagagccgattgcggctttaccagcgagagctaccagcagggcgtgctgagcgccaccatcctgtacgagatcctgctgggcaaggccaccctgtacgccgtgctggtgtctgccctggtgctgatggctatggtcaagcggaaggacagccggggaagggccaagcgatctggatctggagcaacaaacttctcactactcaaacaagcaggtgacgtggaggagaatcccgggcctactagtgccaccatggactggatttggcgcatccttttccttgtcggcgctgctaccggcgcccattccgggcccgaagtgcaactggttgaatccggtggcggcctggtgcaagcaggcggatctctcagacttagctgtgccgcctccggcagaaccttcacaatgggatggtttaggcaggctccagggaaagagagagagttcgtcgccgccatctctctgtctcccacactggcctactacgccgactctgtgaaaggccggttcaccatctccagagataatgccaagaacaccgtggtgctgcaaatgaactctctgaaacccgaggatacagccctgtactattgtgccgctgaccggaagtccgtgatgagcatcagacccgattactggggacagggcacacaagtcacagtgtcctctggatccggcggcggaggatctggcggaggcggatctgggggcggaggctctttcgaagtccaacttgtggagtctggagggggcctggtgcagcccggcggctctctcagactgtcttgtgcggcaagcggctacaccttcagctcttactggatagaatgggtgaggcaggcacctggaaagggactggagtggattggagagattctgccaggagggggagatacaaattacaatgaaatcttcaaggggcgggccaccttttcagcggataccagcaagaatacagcttacctgcagatgaatagcctccgggcagaagataccgctgtttattattgcacgagacgggtgccaataagactggactattgggggcaagggactcttgtcaccgtcagttcaacgcgtatccagaaccctgatcctgccgtgtaccagctgcgggatagcaagagcagcgacaagagcgtgtgtctgttcaccgacttcgacagccagaccaacgtgtcccagagcaaggactccgacgtgtacatcaccgataagtgcgtgctggacatgcggagcatggacttcaagagcaactccgccgtggcctggtccaacaagtccgatttcgcctgcgccaacgccttcaacaacagcattatccccgaggacacattcttcccaagccccgagagcagctgcgacgtgaagctggtggaaaagagcttcgagacagacaccaacctgaacttccagaacctgagcgtgatcggcttcagaatcctgctgctgaaagtggccggctttaacctgctgatgaccctgcggctgtggtccagctaa

SEQ ID NO: 8890 - DNA, 2283 bp, synthetic construct
  source 1..2283: mol_type = other DNA
atggccttaccagtgaccgccttgctcctgccgctggccttgctgctccacgccgccaggccggacatccagttgacccagtcccccagctcactcagcgccagtgtgggggaccgggtgaccattacctgtaaagccagtcagagtgtggactatgagggggatagcttcctgaattggtatcagcagaagcctggcaaagccccaaagctgctgatctacgctgcatctaatctggagtcaggcgtgccttctaggttctccggtagtgggtctgggaccgatttcacattgaccatttcatccctccaacccgaggatttcgctacatattactgtcagcagtccaatgaggaccctctcacctttggccagggcaccaaagttgaaattaagagactcgaggacctgaagaacgtgttcccacctgaggtggccgtgttcgagcctagcgaggccgagatcagccacacccagaaagccaccctcgtgtgcctggctaccggcttctaccccgaccatgtggaactgtcttggtgggtcaacggcaaagaggtgcacagcggcgtgtgtaccgacccccagccactgaaagaacagcccgccctgaacgacagccggtactgcctgagcagcagactgagagtgtccgccaccttctggcagaacccccggaaccacttcagatgccaggtgcagttctacggcctgagcgagaacgacgagtggacccaggacagagccaagcccgtgacccagatcgtgtctgccgaagcctggggcagagccgattgcggctttaccagcgagagctaccagcagggcgtgctgagcgccaccatcctgtacgagatcctgctgggcaaggccaccctgtacgccgtgctggtgtctgccctggtgctgatggctatggtcaagcggaaggacagccggggaagggccaagcgatctggatctggagcaacaaacttctcactactcaaacaagcaggtgacgtggaggagaatcccgggcctactagtgccaccatggactggatttggcgcatccttttccttgtcggcgctgctaccggcgcccattccgggcccgaagtgcagctggttgaatctggcggaggactggttcaggctggcggatctctgagactgtcttgtgccgccagcggcagaacctttagcatgggctggtttagacaggcccctggcaaagagagagagttcgtcgccgccatcacatactctggcggcagcccttactacgccgactctgtgaagggcagattcaccatcagccgggacaacgccaagaacaccgtgtacctccagatgaacagcctgaagcctgaggacaccgccgtgtactactgcgccgccaatccaacatacggcagcgactggaacgccgagaattggggccagggaacccaagtgacagtgtctagcggatccggcggcggaggatctggcggaggcggatctgggggcggaggctctttcgaagtccaacttgtggagtctggagggggcctggtgcagcccggcggctctctcagactgtcttgtgcggcaagcggctacaccttcagctcttactggatagaatgggtgaggcaggcacctggaaagggactggagtggattggagagattctgccaggagggggagatacaaattacaatgaaatcttcaaggggcgggccaccttttcagcggataccagcaagaatacagcttacctgcagatgaatagcctccgggcagaagataccgctgtttattattgcacgagacgggtgccaataagactggactattgggggcaagggactcttgtcaccgtcagttcaacgcgtatccagaaccctgatcctgccgtgtaccagctgcgggatagcaagagcagcgacaagagcgtgtgtctgttcaccgacttcgacagccagaccaacgtgtcccagagcaaggactccgacgtgtacatcaccgataagtgcgtgctggacatgcggagcatggacttcaagagcaactccgccgtggcctggtccaacaagtccgatttcgcctgcgccaacgccttcaacaacagcattatccccgaggacacattcttcccaagccccgagagcagctgcgacgtgaagctggtggaaaagagcttcgagacagacaccaacctgaacttccagaacctgagcgtgatcggcttcagaatcctgctgctgaaagtggccggctttaacctgctgatgaccctgcggctgtggtccagctaa

SEQ ID NO: 8891 - DNA, 1869 bp, synthetic construct
  source 1..1869: mol_type = other DNA
atggccttaccagtgaccgccttgctcctgccgctggccttgctgctccacgccgccaggccggacgacatccagttgacccagtcccccagctcactcagcgccagtgtgggggaccgggtgaccattacctgtaaagccagtcagagtgtggactatgagggggatagcttcctgaattggtatcagcagaagcctggcaaagccccaaagctgctgatctacgctgcatctaatctggagtcaggcgtgccttctaggttctccggtagtgggtctgggaccgatttcacattgaccatttcatccctccaacccgaggatttcgctacatattactgtcagcagtccaatgaggaccctctcacctttggccagggcaccaaagttgaaattaagagactcgaggacctgaagaacgtgttcccacctgaggtggccgtgttcgagcctagcgaggccgagatcagccacacccagaaagccaccctcgtgtgcctggctaccggcttctaccccgaccatgtggaactgtcttggtgggtcaacggcaaagaggtgcacagcggcgtgtgtaccgacccccagccactgaaagaacagcccgccctgaacgacagccggtactgcctgagcagcagactgagagtgtccgccaccttctggcagaacccccggaaccacttcagatgccaggtgcagttctacggcctgagcgagaacgacgagtggacccaggacagagccaagcccgtgacccagatcgtgtctgccgaagcctggggcagagccgattgcggctttaccagcgagagctaccagcagggcgtgctgagcgccaccatcctgtacgagatcctgctgggcaaggccaccctgtacgccgtgctggtgtctgccctggtgctgatggctatggtcaagcggaaggacagccggggaagggccaagcgatctggatctggagcaacaaacttctcactactcaaacaagcaggtgacgtggaggagaatcccgggcctactagtatggactggatttggcgcatccttttccttgtcggcgctgctaccggcgcgcattccttcgaagtccaacttgtggagtctggagggggcctggtgcagcccggcggctctctcagactgtcttgtgcggcaagcggctacaccttcagctcttactggatagaatgggtgaggcaggcacctggaaagggactggagtggattggagagattctgccaggagggggagatacaaattacaatgaaatcttcaaggggcgggccaccttttcagcggataccagcaagaatacagcttacctgcagatgaatagcctccgggcagaagataccgctgtttattattgcacgagacgggtgccaataagactggactattgggggcaagggactcttgtcaccgtcagttcaacgcgtatccagaaccctgatcctgccgtgtaccagctgcgggatagcaagagcagcgacaagagcgtgtgtctgttcaccgacttcgacagccagaccaacgtgtcccagagcaaggactccgacgtgtacatcaccgataagtgcgtgctggacatgcggagcatggacttcaagagcaactccgccgtggcctggtccaacaagtccgatttcgcctgcgccaacgccttcaacaacagcattatccccgaggacacattcttcccaagccccgagagcagctgcgacgtgaagctggtggaaaagagcttcgagacagacaccaacctgaacttccagaacctgagcgtgatcggcttcagaatcctgctgctgaaagtggccggctttaacctgctgatgaccctgcggctgtggtccagctaa

SEQ ID NO: 8892 - DNA, 2283 bp, synthetic construct
  source 1..2283: mol_type = other DNA
atggccttaccagtgaccgccttgctcctgccgctggccttgctgctccacgccgccaggccggacatccagttgacccagtcccccagctcactcagcgccagtgtgggggaccgggtgaccattacctgtaaagccagtcagagtgtggactatgagggggatagcttcctgaattggtatcagcagaagcctggcaaagccccaaagctgctgatctacgctgcatctaatctggagtcaggcgtgccttctaggttctccggtagtgggtctgggaccgatttcacattgaccatttcatccctccaacccgaggatttcgctacatattactgtcagcagtccaatgaggaccctctcacctttggccagggcaccaaagttgaaattaagagactcgaggacctgaagaacgtgttcccacctgaggtggccgtgttcgagcctagcgaggccgagatcagccacacccagaaagccaccctcgtgtgcctggctaccggcttctaccccgaccatgtggaactgtcttggtgggtcaacggcaaagaggtgcacagcggcgtgtgtaccgacccccagccactgaaagaacagcccgccctgaacgacagccggtactgcctgagcagcagactgagagtgtccgccaccttctggcagaacccccggaaccacttcagatgccaggtgcagttctacggcctgagcgagaacgacgagtggacccaggacagagccaagcccgtgacccagatcgtgtctgccgaagcctggggcagagccgattgcggctttaccagcgagagctaccagcagggcgtgctgagcgccaccatcctgtacgagatcctgctgggcaaggccaccctgtacgccgtgctggtgtctgccctggtgctgatggctatggtcaagcggaaggacagccggggaagggccaagcgatctggatctggagcaacaaacttctcactactcaaacaagcaggtgacgtggaggagaatcccgggcctactagtgccaccatggactggatttggcgcatccttttccttgtcggcgctgctaccggcgcccattccgggcccgaagtgcaactggttgaatccggtggcggcctggtgcaagcaggcggatctctcagacttagctgtgccgcctccggcagaaccttcacaatgggatggtttaggcaggctccagggaaagagagagagttcgtcgccgccatctctctgtctcccacactggcctactacgccgactctgtgaaaggccggttcaccatctccagagataatgccaagaacaccgtggtgctgcaaatgaactctctgaaacccgaggatacagccctgtactattgtgccgctgaccggaagtccgtgatgagcatcagacccgattactggggacagggcacacaagtcacagtgtcctctggatccggcggcggaggatctggcggaggcggatctgggggcggaggctctttcgaagtccaacttgtggagtctggagggggcctggtgcagcccggcggctctctcagactgtcttgtgcggcaagcggctacaccttcacctcttactggatagaatgggtgaggcaggcacctggaaagggactggagtggattggagagattctgccaggagggggagatacaaattacaatgaaatcttcaaggggcgggccaccttttcagcggataccagcaagaatacagcttacctgcagatgaatagcctccgggcagaagataccgctgtttattattgcacgagacgggtgccaataagactggactattgggggcaagggactcttgtcaccgtcagttcaacgcgtatccagaaccctgatcctgccgtgtaccagctgcgggatagcaagagcagcgacaagagcgtgtgtctgttcaccgacttcgacagccagaccaacgtgtcccagagcaaggactccgacgtgtacatcaccgataagtgcgtgctggacatgcggagcatggacttcaagagcaactccgccgtggcctggtccaacaagtccgatttcgcctgcgccaacgccttcaacaacagcattatccccgaggacacattcttcccaagccccgagagcagctgcgacgtgaagctggtggaaaagagcttcgagacagacaccaacctgaacttccagaacctgagcgtgatcggcttcagaatcctgctgctgaaagtggccggctttaacctgctgatgaccctgcggctgtggtccagctaa

SEQ ID NO: 8893 - DNA, 2283 bp, synthetic construct
  source 1..2283: mol_type = other DNA
atggccttaccagtgaccgccttgctcctgccgctggccttgctgctccacgccgccaggccggacatccagttgacccagtcccccagctcactcagcgccagtgtgggggaccgggtgaccattacctgtaaagccagtcagagtgtggactatgagggggatagcttcctgaattggtatcagcagaagcctggcaaagccccaaagctgctgatctacgctgcatctaatctggagtcaggcgtgccttctaggttctccggtagtgggtctgggaccgatttcacattgaccatttcatccctccaacccgaggatttcgctacatattactgtcagcagtccaatgaggaccctctcacctttggccagggcaccaaagttgaaattaagagactcgaggacctgaagaacgtgttcccacctgaggtggccgtgttcgagcctagcgaggccgagatcagccacacccagaaagccaccctcgtgtgcctggctaccggcttctaccccgaccatgtggaactgtcttggtgggtcaacggcaaagaggtgcacagcggcgtgtgtaccgacccccagccactgaaagaacagcccgccctgaacgacagccggtactgcctgagcagcagactgagagtgtccgccaccttctggcagaacccccggaaccacttcagatgccaggtgcagttctacggcctgagcgagaacgacgagtggacccaggacagagccaagcccgtgacccagatcgtgtctgccgaagcctggggcagagccgattgcggctttaccagcgagagctaccagcagggcgtgctgagcgccaccatcctgtacgagatcctgctgggcaaggccaccctgtacgccgtgctggtgtctgccctggtgctgatggctatggtcaagcggaaggacagccggggaagggccaagcgatctggatctggagcaacaaacttctcactactcaaacaagcaggtgacgtggaggagaatcccgggcctactagtgccaccatggactggatttggcgcatccttttccttgtcggcgctgctaccggcgcccattccgggcccgaagtgcagctggttgaatctggcggaggactggttcaggctggcggatctctgagactgtcttgtgccgccagcggcagaacctttagcatgggctggtttagacaggcccctggcaaagagagagagttcgtcgccgccatcacatactctggcggcagcccttactacgccgactctgtgaagggcagattcaccatcagccgggacaacgccaagaacaccgtgtacctccagatgaacagcctgaagcctgaggacaccgccgtgtactactgcgccgccaatccaacatacggcagcgactggaacgccgagaattggggccagggaacccaagtgacagtgtctagcggatccggcggcggaggatctggcggaggcggatctgggggcggaggctctttcgaagtccaacttgtggagtctggagggggcctggtgcagcccggcggctctctcagactgtcttgtgcggcaagcggctacaccttcacctcttactggatagaatgggtgaggcaggcacctggaaagggactggagtggattggagagattctgccaggagggggagatacaaattacaatgaaatcttcaaggggcgggccaccttttcagcggataccagcaagaatacagcttacctgcagatgaatagcctccgggcagaagataccgctgtttattattgcacgagacgggtgccaataagactggactattgggggcaagggactcttgtcaccgtcagttcaacgcgtatccagaaccctgatcctgccgtgtaccagctgcgggatagcaagagcagcgacaagagcgtgtgtctgttcaccgacttcgacagccagaccaacgtgtcccagagcaaggactccgacgtgtacatcaccgataagtgcgtgctggacatgcggagcatggacttcaagagcaactccgccgtggcctggtccaacaagtccgatttcgcctgcgccaacgccttcaacaacagcattatccccgaggacacattcttcccaagccccgagagcagctgcgacgtgaagctggtggaaaagagcttcgagacagacaccaacctgaacttccagaacctgagcgtgatcggcttcagaatcctgctgctgaaagtggccggctttaacctgctgatgaccctgcggctgtggtccagctaa

SEQ ID NO: 8894 - DNA, 1869 bp, synthetic construct; identical to SEQ ID NO: 4738
  source 1..1869: mol_type = other DNA

SEQ ID NO: 8895 - DNA, 1962 bp, synthetic construct; identical to SEQ ID NO: 4984
  source 1..1962: mol_type = other DNA

SEQ ID NO: 8896 - DNA, 1962 bp, synthetic construct; identical to SEQ ID NO: 4984
  source 1..1962: mol_type = other DNA

SEQ ID NO: 8897 - DNA, 1962 bp, synthetic construct; identical to SEQ ID NO: 4984
  source 1..1962: mol_type = other DNA

SEQ ID NO: 8898 - DNA, 1962 bp, synthetic construct; identical to SEQ ID NO: 4984
  source 1..1962: mol_type = other DNA

SEQ ID NO: 8899 - DNA, 2565 bp, synthetic construct; identical to SEQ ID NO: 8885
  source 1..2565: mol_type = other DNA

SEQ ID NO: 8900 - DNA, 1995 bp, synthetic construct
  source 1..1995: mol_type = other DNA
atggccttaccagtgaccgccttgctcctgccgctggccttgctgctccacgccgccaggccggcatgcgctagaagcgaagatcggtatcggaaccccaagggtaccgatattgtgatgacccagagccagaaattcatgagcaccagcgtgggcgacagagtgtccgtgacatgtaaagccagccagaacgtgggctctcacgtcggctggtatcagcagaagtctggacagagccccaaggcactgatctacagcgccagcaatcggtacatcggcgtgcccgatagattcaccggctctggcagcggcaccgatttcaccctgaccatcagcaacgtgcagtccgaggacctggccgagtatttctgccagcagtaccacatctacccctacacctttggaggcggcacccggctggaaatcaagagactcgagatccagaaccctgatcctgccgtgtaccagctgcgggatagcaagagcagcgacaagagcgtgtgtctgttcaccgacttcgacagccagaccaacgtgtcccagagcaaggactccgacgtgtacatcaccgataagtgcgtgctggacatgcggagcatggacttcaagagcaactccgccgtggcctggtccaacaagtccgatttcgcctgcgccaacgccttcaacaacagcattatccccgaggacacattcttcccaagcagcgacgtgccctgcgacgtgaagctggtggaaaagagcttcgagacagacaccaacctgaacttccagaacctgagcgtgatcggcttcagaatcctgctgctgaaagtggccggctttaacctgctgatgaccctgcggctgtggtccagccgcgccaagagaagcggatctggcgtgaagcagaccctgaatttcgacctgctgaagctggctggcgacgtggaatccaacccaggccctactagtgccaccatggactggatttggcgcatccttttccttgtcggcgctgctaccggcgcccattccgggcccgccagaagcgaggacagatacagaaaccccaaaggatccggcggcggaggatctggcggaggcggatctgggggcggaggctctttcgaagtgcagcttcagcagtctgccgccgaacttgctagacctggcgcttctgtgcggatgagctgtagaaccagcggctacaccttcaccacctacaccatccactggatgaagcagcggcctggacagggccttgagtggatcggctacatcaaccccaacggcggctataccgagtacaaccagaagttccgggacagaaccacactgaccgccgacaagtctagcagcaccgcctacatgcagctgagcagcctgacaagcgaggacagcgccgtgtactactgcaccagaaacttcgactactggggccagggcacaaccctgacagtgtctagtacgcgtgaggacctgaagaacgtgttcccacctgaggtggccgtgttcgagcctagcaaggccgagatcgcccacacccagaaagccaccctcgtgtgcctggctaccggcttctaccccgaccatgtggaactgtcttggtgggtcaacggcaaagaggtgcacagcggcgtgtgtaccgacccccagccactgaaagaacagcccgccctgaacgacagccggtactgcctgagcagcagactgagagtgtccgccaccttctggcagaacccccggaaccacttcagatgccaggtgcagttctacggcctgagcgagaacgacgagtggacccaggacagagccaagcccgtgacccagatcgtgtctgccgaagcctggggcagagccgattgcggcatcaccagcgccagctaccaccagggcgtgctgagcgccaccatcctgtacgagatcctgctgggcaaggccaccctgtacgccgtgctggtgtctgccctggtgctgatggctatggtcaagcggaaggacagccggggataa

SEQ ID NO: 8901 - DNA, 3258 bp, synthetic construct
  source 1..3258: mol_type = other DNA
atggccttaccagtgaccgccttgctcctgccgctggccttgctgctccacgccgccaggccgagctacgtgctgacacagcctccatccgtgtctgtggctccaggacagaccgccagaatcacatgcggcggcaacaacatcggcggcaagagcgtgcactggtatcagcagccacctggacaggctccagtggtggtggtgtacgacgacagcgatagacctagcggcatccccgagagattcagcggcagcaattccggcaataccgccacactgaccatcagcagagtggaagctggcgacgaggccgtgtactactgccaagtgtgggacagcagcagcgatcacgtggtgtttggcggcggaacaaagctgacagtgcttctcgaggacctgaagaacgtgttcccacctgaggtggccgtgttcgagcctagcgaggccgagatcagccacacccagaaagccaccctcgtgtgcctggctaccggcttctaccccgaccatgtggaactgtcttggtgggtcaacggcaaagaggtgcacagcggcgtgtctaccgacccccagccactgaaagaacagcccgccctgaacgacagccggtactgcctgagcagcagactgagagtgtccgccaccttctggcagaacccccggaaccacttcagatgccaggtgcagttctacggcctgagcgagaacgacgagtggacccaggacagagccaagcccgtgacccagatcgtgtctgccgaagcctggggcagagccgattgcggatcccagagcttcggcctgctggaccccaagctgtgctacctgctggatggcatcctgttcatctacggcgtgatcctgaccgccctgttcctgagagtgaagttcagcagaagcgccgacgcccctgcctaccagcagggacagaaccaactgtacaacgagctgaacctgggcagacgggaagagtacgacgtgctggacaagcggagaggcagggaccctgagatgggcggaaagccccggagaaagaacccccaggaaggactgtataacgaactccagaaagacaagatggccgaagcctacagcgagatcggcatgaagggcgagcggagaagaggcaagggccacgatggcctgtaccagggcctgagcaccgccaccaaggacacctatgacgccctgcacatgcaggccctgcctccaagaagggccaagcgatctggatctggagcaacaaacttctcactactcaaacaagcaggtgacgtggaggagaatcccgggcctactagtatggactggatttggcgcatccttttccttgtcggcgctgctaccggcgcgcattccttcgaacaactccagctgcaagagtctggccctggcctggtcaagcctagcgaaacactgagcctgacctgtaccgtgtctggcggctctatcagctccagcagctatttctggggctggatcagacaacctcctggcaaaggactggaatggatcggctccatctactacagcggcatcacctactacaaccccagcctgaagtccagagtgaccatctccgtggacaccagcaagaaccagttctccctgaagctgagcagcgtgacagccgccgataccgccgtgtattattgtgccagacatgacggcgctgtggccggcctgtttgattattggggacagggcaccctggtcaccgtgtcatctgctacgcgtatccagaaccctgatcctgccgtgtaccagctgcgggatagcaagagcagcgacaagagcgtgtgtctgttcaccgacttcgacagccagaccaacgtgtcccagagcaaggactccgacgtgtacatcaccgataagaccgtgctggacatgcggagcatggacttcaagagcaactccgccgtggcctggtccaacaagtccgatttcgcctgcgccaacgccttcaacaacagcattatccccgaggacacattcttcccaagccccgagagcagctgcggtacccagagttttgggttgttggaccctaaattgtgctatctgttggacggaatcctgttcatttacggagtgatcctgaccgcattgttcctgaacatctatgatgcctttgttatctactcaagccaggatgaggactgggtaaggaatgagctagtaaagaatttagaagaaggggtgcctccatttcagctctgccttcactacagagactttattcccggtgtggccattgctgccaacatcatccatgaaggtttccataaaagccgaaaggtgattgttgtggtgtcccagcacttcatccagagccgctggtgtatctttgaatatgagattgctcagacctggcagtttctgagcagtcgtgctggtatcatcttcattgtcctgcagaaggtggagaagaccctgctcaggcagcaggtggagctgtaccgccttctcagcaggaacacttacctggagtgggaggacagtgtcctggggcggcacatcttctggagacgactcagaaaagccctgctggatggtcgcgccaagagaagcggatctggcgtgaagcagaccctgaatttcgacctgctgaagctggctggcgacgtggaatccaacccaggcccttctagaggccatatgaccgagtacaagcccacggtgcgcctcgccacccgcgacgacgtccccagggccgtacgcaccctcgccgccgcgttcgccgactaccccgccacgcgccacaccgtcgatccggaccgccacatcgagcgggtcaccgagctgcaagaactcttcctcacgcgcgtcgggctcgacatcggcaaggtgtgggtcgcggacgacggcgccgcggtggcggtctggaccacgccggagagcgtcgaagcgggggcggtgttcgccgagatcggcccgcgcatggccgagttgagcggttcccggctggccgcgcagcaacagatggaaggcctcctggcgccgcaccggcccaaggagcccgcgtggttcctggccaccgtcggcgtctcgcccgaccaccagggcaagggtctgggcagcgccgtcgtgctccccggagtggaggcggccgagcgcgccggggtgcccgccttcctggagacctccgcgccccgcaacctccccttctacgagcggctcggcttcaccgtcaccgccgacgtcgaggtgcccgaaggaccgcgcacctggtgcatgacccgcaagcccggtgcctga

SEQ ID NO: 8902 - DNA, 3564 bp, synthetic construct
  source 1..3564: mol_type = other DNA
atggccttaccagtgaccgccttgctcctgccgctggccttgctgctccacgccgccaggccggacatccagatgacacagagccctagcagcctgtctgccagcgtgggagacagagtgaccatcacatgcaaggccagccaggatgtgggcacagccgtggattggtatcagcagaagcctggcaaggcccctaagctgctgatctactgggccagcacaagacacacaggcgtgcccagcagattttctggcagcggctctggcaccgacttcaccctgacaatatccagcctccagcctgaggacttcgccacctactactgccagcagtacaacagctaccctctgaccttcggccagggcaccaaggtggaaatcaaaagactcgagggacagcctaaggccaatcctaccgtgacactgttccctccaagcagcgaagaactccaggccaacaaggccacacttgtgtgcctgatctccgacttctaccctggggctgtgacagtggcttggaaggccgatggatctcctgtgaaagccggcgtggaaaccaccaagccatccaagcagagcaacaacaaatacgccgccagctcctacctgagcctgacacctgagcagtggaagtcccacagatcctacagctgccaagtgacccacgaaggcagcaccgtggaaaagacagtggcccctacagagtgcagcggatcccagagcttcggcctgctggaccccaagctgtgctacctgctggatggcatcctgttcatctacggcgtgatcctgaccgccctgttcctgagagtgaagttcagcagaagcgccgacgcccctgcctaccagcagggacagaaccaactgtacaacgagctgaacctgggcagacgggaagagtacgacgtgctggacaagcggagaggcagggaccctgagatgggcggaaagccccggagaaagaacccccaggaaggactgtataacgaactccagaaagacaagatggccgaagcctacagcgagatcggcatgaagggcgagcggagaagaggcaagggccacgatggcctgtaccagggcctgagcaccgccaccaaggacacctatgacgccctgcacatgcaggccctgcctccaagaagggccaagcgatctggatctggagcaacaaacttctcactactcaaacaagcaggtgacgtggaggagaatcccgggcctactagtgccaccatggactggatttggcgcatccttttccttgtcggcgctgctaccggcgcccattccgccagaagcgaggacagatacagaaaccccaaattcgaagtgcagctggttgaatcaggtggcggcctggttcaacctggcggatctctgagactgagctgtgccgccagcggctacacctttaccgagtacacaatccactgggtccgacaggcccctggcaaaggacttgagtgggtcgccaacatcaaccccaacaatggcggcaccacctacaaccagaagttcgaggacagattcaccatcagccgggacaacagcaagaacaccctgtacctccagatgaactccctgagagccgaggacaccgccgtgtactattgtgccagaggctggaacttcgactactggggccagggaacactggtcaccgttagctctacgcgtgcctctacaaagggaccctccgtgtttcctctggctcccagcagcaagtctacaagcggaggaacagccgctctgggctgcctggtcaaggattactttcccgagcctgtgaccgtgtcctggaatagcggagcactgacaagcggcgtgcacacctttccagccgtgctgcaaagcagcggcctgtactctctgagcagcgtggtcacagtgcctagctctagcctgggcacccagacctacatctgcaatgtgaaccacaagcctagcaacaccaaggtggacaagagagtggaacccaagagctgtggtacccagagttttgggttgttggaccctaaattgtgctatctgttggacggaatcctgttcatttacggagtgatcctgaccgcattgttcctgcgggttaagttttccagatccgcagacgcacccgcttaccaacaagggcagaaccaactctacaatgaacttaatttggggcggagggaagagtacgacgttctggacaaaaggaggggacgagatcccgagatgggcggaaagcctcgaaggaagaatccgcaagaggggctttataacgaactccagaaagataaaatggcagaagcctatagtgagattgggatgaagggagaaaggaggaggggtaaaggtcacgatgggttgtaccaaggattgagcacagccactaaagatacctatgatgcgctccacatgcaggccctgccgccaagaaacatctatgatgcctttgttatctactcaagccaggatgaggactgggtaaggaatgagctagtaaagaatttagaagaaggggtgcctccatttcagctctgccttcactacagagactttattcccggtgtggccattgctgccaacatcatccatgaaggtttccataaaagccgaaaggtgattgttgtggtgtcccagcacttcatccagagccgctggtgtatctttgaatatgagattgctcagacctggcagtttctgagcagtcgtgctggtatcatcttcattgtcctgcagaaggtggagaagaccctgctcaggcagcaggtggagctgtaccgccttctcagcaggaacacttacctggagtgggaggacagtgtcctggggcggcacatcttctggagacgactcagaaaagccctgctggatggtcgcgccaagagaagcggatctggcgtgaagcagaccctgaatttcgacctgctgaagctggctggcgacgtggaatccaacccaggcccttctagaggccatatgaccgagtacaagcccacggtgcgcctcgccacccgcgacgacgtccccagggccgtacgcaccctcgccgccgcgttcgccgactaccccgccacgcgccacaccgtcgatccggaccgccacatcgagcgggtcaccgagctgcaagaactcttcctcacgcgcgtcgggctcgacatcggcaaggtgtgggtcgcggacgacggcgccgcggtggcggtctggaccacgccggagagcgtcgaagcgggggcggtgttcgccgagatcggcccgcgcatggccgagttgagcggttcccggctggccgcgcagcaacagatggaaggcctcctggcgccgcaccggcccaaggagcccgcgtggttcctggccaccgtcggcgtctcgcccgaccaccagggcaagggtctgggcagcgccgtcgtgctccccggagtggaggcggccgagcgcgccggggtgcccgccttcctggagacctccgcgccccgcaacctccccttctacgagcggctcggcttcaccgtcaccgccgacgtcgaggtgcccgaaggaccgcgcacctggtgcatgacccgcaagcccggtgcctga

SEQ ID NO: 8903 - DNA, 3594 bp, synthetic construct
  source 1..3594: mol_type = other DNA
atggccttaccagtgaccgccttgctcctgccgctggccttgctgctccacgccgccaggccgagctacgtgctgacacagcctccatccgtgtctgtggctccaggacagaccgccagaatcacatgcggcggcaacaacatcggcggcaagagcgtgcactggtatcagcagccacctggacaggctccagtggtggtggtgtacgacgacagcgatagacctagcggcatccccgagagattcagcggcagcaattccggcaataccgccacactgaccatcagcagagtggaagctggcgacgaggccgtgtactactgccaagtgtgggacagcagcagcgatcacgtggtgtttggcggcggaacaaagctgacagtgcttctcgaggacctgaagaacgtgttcccacctgaggtggccgtgttcgagcctagcgaggccgagatcagccacacccagaaagccaccctcgtgtgcctggctaccggcttctaccccgaccatgtggaactgtcttggtgggtcaacggcaaagaggtgcacagcggcgtgtctaccgacccccagccactgaaagaacagcccgccctgaacgacagccggtactgcctgagcagcagactgagagtgtccgccaccttctggcagaacccccggaaccacttcagatgccaggtgcagttctacggcctgagcgagaacgacgagtggacccaggacagagccaagcccgtgacccagatcgtgtctgccgaagcctggggcagagccgattgcggatcccagagcttcggcctgctggaccccaagctgtgctacctgctggatggcatcctgttcatctacggcgtgatcctgaccgccctgttcctgagagtgaagttcagcagaagcgccgacgcccctgcctaccagcagggacagaaccaactgtacaacgagctgaacctgggcagacgggaagagtacgacgtgctggacaagcggagaggcagggaccctgagatgggcggaaagccccggagaaagaacccccaggaaggactgtataacgaactccagaaagacaagatggccgaagcctacagcgagatcggcatgaagggcgagcggagaagaggcaagggccacgatggcctgtaccagggcctgagcaccgccaccaaggacacctatgacgccctgcacatgcaggccctgcctccaagaagggccaagcgatctggatctggagcaacaaacttctcactactcaaacaagcaggtgacgtggaggagaatcccgggcctactagtatggactggatttggcgcatccttttccttgtcggcgctgctaccggcgcgcattccttcgaacaactccagctgcaagagtctggccctggcctggtcaagcctagcgaaacactgagcctgacctgtaccgtgtctggcggctctatcagctccagcagctatttctggggctggatcagacaacctcctggcaaaggactggaatggatcggctccatctactacagcggcatcacctactacaaccccagcctgaagtccagagtgaccatctccgtggacaccagcaagaaccagttctccctgaagctgagcagcgtgacagccgccgataccgccgtgtattattgtgccagacatgacggcgctgtggccggcctgtttgattattggggacagggcaccctggtcaccgtgtcatctgctacgcgtatccagaaccctgatcctgccgtgtaccagctgcgggatagcaagagcagcgacaagagcgtgtgtctgttcaccgacttcgacagccagaccaacgtgtcccagagcaaggactccgacgtgtacatcaccgataagaccgtgctggacatgcggagcatggacttcaagagcaactccgccgtggcctggtccaacaagtccgatttcgcctgcgccaacgccttcaacaacagcattatccccgaggacacattcttcccaagccccgagagcagctgcggtacccagagttttgggttgttggaccctaaattgtgctatctgttggacggaatcctgttcatttacggagtgatcctgaccgcattgttcctgcgggttaagttttccagatccgcagacgcacccgcttaccaacaagggcagaaccaactctacaatgaacttaatttggggcggagggaagagtacgacgttctggacaaaaggaggggacgagatcccgagatgggcggaaagcctcgaaggaagaatccgcaagaggggctttataacgaactccagaaagataaaatggcagaagcctatagtgagattgggatgaagggagaaaggaggaggggtaaaggtcacgatgggttgtaccaaggattgagcacagccactaaagatacctatgatgcgctccacatgcaggccctgccgccaagaaacatctatgatgcctttgttatctactcaagccaggatgaggactgggtaaggaatgagctagtaaagaatttagaagaaggggtgcctccatttcagctctgccttcactacagagactttattcccggtgtggccattgctgccaacatcatccatgaaggtttccataaaagccgaaaggtgattgttgtggtgtcccagcacttcatccagagccgctggtgtatctttgaatatgagattgctcagacctggcagtttctgagcagtcgtgctggtatcatcttcattgtcctgcagaaggtggagaagaccctgctcaggcagcaggtggagctgtaccgccttctcagcaggaacacttacctggagtgggaggacagtgtcctggggcggcacatcttctggagacgactcagaaaagccctgctggatggtcgcgccaagagaagcggatctggcgtgaagcagaccctgaatttcgacctgctgaagctggctggcgacgtggaatccaacccaggcccttctagaggccatatgaccgagtacaagcccacggtgcgcctcgccacccgcgacgacgtccccagggccgtacgcaccctcgccgccgcgttcgccgactaccccgccacgcgccacaccgtcgatccggaccgccacatcgagcgggtcaccgagctgcaagaactcttcctcacgcgcgtcgggctcgacatcggcaaggtgtgggtcgcggacgacggcgccgcggtggcggtctggaccacgccggagagcgtcgaagcgggggcggtgttcgccgagatcggcccgcgcatggccgagttgagcggttcccggctggccgcgcagcaacagatggaaggcctcctggcgccgcaccggcccaaggagcccgcgtggttcctggccaccgtcggcgtctcgcccgaccaccagggcaagggtctgggcagcgccgtcgtgctccccggagtggaggcggccgagcgcgccggggtgcccgccttcctggagacctccgcgccccgcaacctccccttctacgagcggctcggcttcaccgtcaccgccgacgtcgaggtgcccgaaggaccgcgcacctggtgcatgacccgcaagcccggtgcctga

SEQ ID NO: 8904 - DNA, 3792 bp, synthetic construct
  source 1..3792: mol_type = other DNA
atggccttaccagtgaccgccttgctcctgccgctggccttgctgctccacgccgccaggccggacatccagatgacacagagccctagcagcctgtctgccagcgtgggagacagagtgaccatcacatgcaaggccagcgaccacatcaacaactggctggcctggtatcagcagaagcctggacaggcccctaagctgctgatctacggcgctaccacactggaaacaggcgtgcccagcagattttctggcagcggctctggcaccgactacaccctgacaatatccagcctccagcctgaggacttcgccacctactactgtcagcagagctggaacaccccttggacattcggccagggcaccaagctggaaatcaagagactcgaggacctgaagaacgtgttcccacctgaggtggccgtgttcgagcctagcgaggccgagatcagccacacccagaaagccaccctcgtgtgcctggctaccggcttctaccccgaccatgtggaactgtcttggtgggtcaacggcaaagaggtgcacagcggcgtgtgtaccgacccccagccactgaaagaacagcccgccctgaacgacagccggtactgcctgagcagcagactgagagtgtccgccaccttctggcagaacccccggaaccacttcagatgccaggtgcagttctacggcctgagcgagaacgacgagtggacccaggacagagccaagcccgtgacccagatcgtgtctgccgaagcctggggcagagccgattgcggctttaccagcgagagctaccagcagggcgtgctgagcgccggatcccagagcttcggcctgctggaccccaagctgtgctacctgctggatggcatcctgttcatctacggcgtgatcctgaccgccctgttcctgaggagtaagaggagcaggctcctgcacagtgactacatgaacatgactccacgccgccccggacccacccgcaagcattaccagccctatgccccaccacgcgacttcgcagcctatcgctccagagtgaagttcagcagaagcgccgacgcccctgcctaccagcagggacagaaccaactgtacaacgagctgaacctgggcagacgggaagagtacgacgtgctggacaagcggagaggcagggaccctgagatgggcggaaagccccggagaaagaacccccaggaaggactgtataacgaactccagaaagacaagatggccgaagcctacagcgagatcggcatgaagggcgagcggagaagaggcaagggccacgatggcctgtaccagggcctgagcaccgccaccaaggacacctatgacgccctgcacatgcaggccctgcctccaagaagggccaagcgatctggatctggagcaacaaacttctcactactcaaacaagcaggtgacgtggaggagaatcccgggcctactagtatggactggatttggcgcatccttttccttgtcggcgctgctaccggcgcgcattccttcgaacaagttcagcttcaacagcctggcgctgagctggtcaaacctggcgcttctgtgaagatgagctgcaaagccagcggctacgccttcagcagctactggatcaactggatgaagcagaaacccggccagggactcgaatggatcggccaaatctatcccggcgacggcgacaccaactacaacggcaagttcaagggcagagccacactgaccgccgatacctctagcagcacagcctacatgcagctgagcagcctgaccagcgaagatagcgccgtgtacttctgtgcccggtccatcacaacagtcgtgggctgcgctatggactattggggccagggaacaagcgtgaccgtgtctagtacgcgtatccagaaccctgatcctgccgtgtaccagctgcgggatagcaagagcagcgacaagagcgtgtgtctgttcaccgacttcgacagccagaccaacgtgtcccagagcaaggactccgacgtgtacatcaccgataagtgcgtgctggacatgcggagcatggacttcaagagcaactccgccgtggcctggtccaacaagtccgatttcgcctgcgccaacgccttcaacaacagcattatccccgaggacacattcttcccaagccccgagagcagctgcgacgtgaagctggtggaaaagagcttcgagacagacggtacccagagttttgggttgttggaccctaaattgtgctatctgttggacggaatcctgttcatttacggagtgatcctgaccgcattgttcctgcgggttaagttttccagatccgcagacgcacccgcttaccaacaagggcagaaccaactctacaatgaacttaatttggggcggagggaagagtacgacgttctggacaaaaggaggggacgagatcccgagatgggcggaaagcctcgaaggaagaatccgcaagaggggctttataacgaactccagaaagataaaatggcagaagcctatagtgagattgggatgaagggagaaaggaggaggggtaaaggtcacgatgggttgtaccaaggattgagcacagccactaaagatacctatgatgcgctccacatgcaggccctgccgccaagaaacatctatgatgcctttgttatctactcaagccaggatgaggactgggtaaggaatgagctagtaaagaatttagaagaaggggtgcctccatttcagctctgccttcactacagagactttattcccggtgtggccattgctgccaacatcatccatgaaggtttccataaaagccgaaaggtgattgttgtggtgtcccagcacttcatccagagccgctggtgtatctttgaatatgagattgctcagacctggcagtttctgagcagtcgtgctggtatcatcttcattgtcctgcagaaggtggagaagaccctgctcaggcagcaggtggagctgtaccgccttctcagcaggaacacttacctggagtgggaggacagtgtcctggggcggcacatcttctggagacgactcagaaaagccctgctggatggtcgcgccaagagaagcggatctggcgtgaagcagaccctgaatttcgacctgctgaagctggctggcgacgtggaatccaacccaggcccttctagaggccatatgaccgagtacaagcccacggtgcgcctcgccacccgcgacgacgtccccagggccgtacgcaccctcgccgccgcgttcgccgactaccccgccacgcgccacaccgtcgatccggaccgccacatcgagcgggtcaccgagctgcaagaactcttcctcacgcgcgtcgggctcgacatcggcaaggtgtgggtcgcggacgacggcgccgcggtggcggtctggaccacgccggagagcgtcgaagcgggggcggtgttcgccgagatcggcccgcgcatggccgagttgagcggttcccggctggccgcgcagcaacagatggaaggcctcctggcgccgcaccggcccaaggagcccgcgtggttcctggccaccgtcggcgtctcgcccgaccaccagggcaagggtctgggcagcgccgtcgtgctccccggagtggaggcggccgagcgcgccggggtgcccgccttcctggagacctccgcgccccgcaacctccccttctacgagcggctcggcttcaccgtcaccgccgacgtcgaggtgcccgaaggaccgcgcacctggtgcatgacccgcaagcccggtgcctga

SEQ ID NO: 8905 - DNA, 4008 bp, synthetic construct
  source 1..4008: mol_type = other DNA
atggccttaccagtgaccgccttgctcctgccgctggccttgctgctccacgccgccaggccggacatccagatgacacagagccctagcagcctgtctgccagcgtgggagacagagtgaccatcacatgcaaggccagcgaccacatcaacaactggctggcctggtatcagcagaagcctggacaggcccctaagctgctgatctacggcgctaccacactggaaacaggcgtgcccagcagattttctggcagcggctctggcaccgactacaccctgacaatatccagcctccagcctgaggacttcgccacctactactgtcagcagagctggaacaccccttggacattcggccagggcaccaagctggaaatcaagagactcgaggacctgaagaacgtgttcccacctgaggtggccgtgttcgagcctagcgaggccgagatcagccacacccagaaagccaccctcgtgtgcctggctaccggcttctaccccgaccatgtggaactgtcttggtgggtcaacggcaaagaggtgcacagcggcgtgtctaccgacccccagccactgaaagaacagcccgccctgaacgacagccggtactgcctgagcagcagactgagagtgtccgccaccttctggcagaacccccggaaccacttcagatgccaggtgcagttctacggcctgagcgagaacgacgagtggacccaggacagagccaagcccgtgacccagatcgtgtctgccgaagcctggggcagagccgattgcggatcccagagcttcggcctgctggaccccaagctgtgctacctgctggatggcatcctgttcatctacggcgtgatcctgaccgccctgttcctgagagtgaagttcagcagaagcgccgacgcccctgcctaccagcagggacagaaccaactgtacaacgagctgaacctgggcagacgggaagagtacgacgtgctggacaagcggagaggcagggaccctgagatgggcggaaagccccggagaaagaacccccaggaaggactgtataacgaactccagaaagacaagatggccgaagcctacagcgagatcggcatgaagggcgagcggagaagaggcaagggccacgatggcctgtaccagggcctgagcaccgccaccaaggacacctatgacgccctgcacatgcaggccctgcctccaagaagggccaagcgatctggatctggagcaacaaacttctcactactcaaacaagcaggtgacgtggaggagaatcccgggcctactagtgccaccatggactggatttggcgcatccttttccttgtcggcgctgctaccggcgcccattccgggcccgaagtgcagctggttgaatctggcggaggactggttcaggctggcggatctctgagactgtcttgtgccgccagcggcagaacctttagcatgggctggtttagacaggcccctggcaaagagagagagttcgtcgccgccatcacatactctggcggcagcccttactacgccgactctgtgaagggcagattcaccatcagccgggacaacgccaagaacaccgtgtacctccagatgaacagcctgaagcctgaggacaccgccgtgtactactgcgccgccaatccaacatacggcagcgactggaacgccgagaattggggccagggaacccaagtgacagtgtctagcggatccggcggcggaggatctggcggaggcggatctgggggcggaggctctttcgaacaagttcagcttcaacagcctggcgctgagctggtcaaacctggcgcttctgtgaagatgagctgcaaagccagcggctacgccttcagcagctactggatcaactggatgaagcagaaacccggccagggactcgaatggatcggccaaatctatcccggcgacggcgacaccaactacaacggcaagttcaagggcagagccacactgaccgccgatacctctagcagcacagcctacatgcagctgagcagcctgaccagcgaagatagcgccgtgtacttctgtgcccggtccatcacaacagtcgtgggctgcgctatggactattggggccagggaacaagcgtgaccgtgtctagtacgcgtatccagaaccctgatcctgccgtgtaccagctgcgggatagcaagagcagcgacaagagcgtgtgtctgttcaccgacttcgacagccagaccaacgtgtcccagagcaaggactccgacgtgtacatcaccgataagaccgtgctggacatgcggagcatggacttcaagagcaactccgccgtggcctggtccaacaagtccgatttcgcctgcgccaacgccttcaacaacagcattatccccgaggacacattcttcccaagccccgagagcagctgcggtacccagagttttgggttgttggaccctaaattgtgctatctgttggacggaatcctgttcatttacggagtgatcctgaccgcattgttcctgcgggttaagttttccagatccgcagacgcacccgcttaccaacaagggcagaaccaactctacaatgaacttaatttggggcggagggaagagtacgacgttctggacaaaaggaggggacgagatcccgagatgggcggaaagcctcgaaggaagaatccgcaagaggggctttataacgaactccagaaagataaaatggcagaagcctatagtgagattgggatgaagggagaaaggaggaggggtaaaggtcacgatgggttgtaccaaggattgagcacagccactaaagatacctatgatgcgctccacatgcaggccctgccgccaagaaacatctatgatgcctttgttatctactcaagccaggatgaggactgggtaaggaatgagctagtaaagaatttagaagaaggggtgcctccatttcagctctgccttcactacagagactttattcccggtgtggccattgctgccaacatcatccatgaaggtttccataaaagccgaaaggtgattgttgtggtgtcccagcacttcatccagagccgctggtgtatctttgaatatgagattgctcagacctggcagtttctgagcagtcgtgctggtatcatcttcattgtcctgcagaaggtggagaagaccctgctcaggcagcaggtggagctgtaccgccttctcagcaggaacacttacctggagtgggaggacagtgtcctggggcggcacatcttctggagacgactcagaaaagccctgctggatggtcgcgccaagagaagcggatctggcgtgaagcagaccctgaatttcgacctgctgaagctggctggcgacgtggaatccaacccaggcccttctagaggccatatgaccgagtacaagcccacggtgcgcctcgccacccgcgacgacgtccccagggccgtacgcaccctcgccgccgcgttcgccgactaccccgccacgcgccacaccgtcgatccggaccgccacatcgagcgggtcaccgagctgcaagaactcttcctcacgcgcgtcgggctcgacatcggcaaggtgtgggtcgcggacgacggcgccgcggtggcggtctggaccacgccggagagcgtcgaagcgggggcggtgttcgccgagatcggcccgcgcatggccgagttgagcggttcccggctggccgcgcagcaacagatggaaggcctcctggcgccgcaccggcccaaggagcccgcgtggttcctggccaccgtcggcgtctcgcccgaccaccagggcaagggtctgggcagcgccgtcgtgctccccggagtggaggcggccgagcgcgccggggtgcccgccttcctggagacctccgcgccccgcaacctccccttctacgagcggctcggcttcaccgtcaccgccgacgtcgaggtgcccgaaggaccgcgcacctggtgcatgacccgcaagcccggtgcctga

SEQ ID NO: 8906 - DNA, 2193 bp, synthetic construct
  source 1..2193: mol_type = other DNA
atggccttaccagtgaccgccttgctcctgccgctggccttgctgctccacgccgccaggccggacatccagatgacacagagccctagcagcctgtctgccagcgtgggagacagagtgaccatcacatgcaaggccagcgaccacatcaacaactggctggcctggtatcagcagaagcctggcaaggcccctaagctgctgatctacggcgctaccacactggaaacaggcgtgcccagcagattttctggcagcggctctggcaccgacttcaccctgacaatatccagcctccagcctgaggacttcgccacctactactgtcagcagagctggaacaccccttggacattcggccagggcaccaaggtggaaatcaagagactcgagggacagcctaaggccaatcctaccgtgacactgttccctccaagcagcgaagaactccaggccaacaaggccacacttgtgtgcctgatctccgacttctaccctggggctgtgacagtggcttggaaggccgatggatctcctgtgaaagccggcgtggaaaccaccaagccatccaagcagagcaacaacaaatacgccgccagctcctacctgagcctgacacctgagcagtggaagtcccacagatcctacagctgccaagtgacccacgaaggcagcaccgtggaaaagacagtggcccctacagagtgcagcggatcccagagcttcggcctgctggaccccaagctgtgctacctgctggatggcatcctgttcatctacggcgtgatcctgaccgccctgttcctgagagtgaagttcagcagaagcgccgacgcccctgcctaccagcagggacagaaccaactgtacaacgagctgaacctgggcagacgggaagagtacgacgtgctggacaagcggagaggcagggaccctgagatgggcggaaagccccggagaaagaacccccaggaaggactgtataacgaactccagaaagacaagatggccgaagcctacagcgagatcggcatgaagggcgagcggagaagaggcaagggccacgatggcctgtaccagggcctgagcaccgccaccaaggacacctatgacgccctgcacatgcaggccctgcctccaagaagggccaagcgatctggatctggagcaacaaacttctcactactcaaacaagcaggtgacgtggaggagaatcccgggcctactagtatggactggatttggcgcatccttttccttgtcggcgctgctaccggcgcgcattccttcgaagttcagctggttgaatctggcggcggactggttcaacctggcggatctctgagactgagctgtgccgcctctggctacgcctttagcagctactgggtcaactgggttcgacaggcccctggcaaaggactggaatgggtcgcccaaatctatcccggcgacggcgacaccaactacaacggcaagttcaagggcagattcaccatcagccgggacaacagcaagaacaccctgtacctccagatgaactccctgagagccgaggacaccgccgtgtactattgtgccagatccatcaccaccgtcgtgggctgcgctatggattattggggccagggaaccctggtcaccgtgtcctctacgcgtgcctctacaaagggaccctccgtgtttcctctggctcccagcagcaagtctacaagcggaggaacagccgctctgggctgcctggtcaaggattactttcccgagcctgtgaccgtgtcctggaatagcggagcactgacaagcggcgtgcacacctttccagccgtgctgcaaagcagcggcctgtactctctgagcagcgtggtcacagtgcctagctctagcctgggcacccagacctacatctgcaatgtgaaccacaagcctagcaacaccaaggtggacaagagagtggaacccaagagctgtggtacccagagttttgggttgttggaccctaaattgtgctatctgttggacggaatcctgttcatttacggagtgatcctgaccgcattgttcctgaagagaggccggaagaagctgctgtacatcttcaagcagcctttcatgcggcccgtgcagaccacccaggaagaggacggctgctcctgccggttccccgaggaagaagaaggcggctgcgagctgtaa

SEQ ID NO: 8907 - DNA, 2409 bp, synthetic construct
  source 1..2409: mol_type = other DNA
atggccttaccagtgaccgccttgctcctgccgctggccttgctgctccacgccgccaggccggacatccagatgacacagagccctagcagcctgtctgccagcgtgggagacagagtgaccatcacatgcaaggccagcgaccacatcaacaactggctggcctggtatcagcagaagcctggcaaggcccctaagctgctgatctacggcgctaccacactggaaacaggcgtgcccagcagattttctggcagcggctctggcaccgacttcaccctgacaatatccagcctccagcctgaggacttcgccacctactactgtcagcagagctggaacaccccttggacattcggccagggcaccaaggtggaaatcaagagactcgagggacagcctaaggccaatcctaccgtgacactgttccctccaagcagcgaagaactccaggccaacaaggccacacttgtgtgcctgatctccgacttctaccctggggctgtgacagtggcttggaaggccgatggatctcctgtgaaagccggcgtggaaaccaccaagccatccaagcagagcaacaacaaatacgccgccagctcctacctgagcctgacacctgagcagtggaagtcccacagatcctacagctgccaagtgacccacgaaggcagcaccgtggaaaagacagtggcccctacagagtgcagcggatcccagagcttcggcctgctggaccccaagctgtgctacctgctggatggcatcctgttcatctacggcgtgatcctgaccgccctgttcctgagagtgaagttcagcagaagcgccgacgcccctgcctaccagcagggacagaaccaactgtacaacgagctgaacctgggcagacgggaagagtacgacgtgctggacaagcggagaggcagggaccctgagatgggcggaaagccccagcggagaaagaacccccaggaaggactgtataacgaactccagaaagacaagatggccgaagcctacagcgagatcggcatgaagggcgagcggagaagaggcaagggccacgatggcctgtaccagggcctgagcaccgccaccaaggacacctatgacgccctgcacatgcaggccctgcctccaagaagggccaagcgatctggatctggagcaacaaacttctcactactcaaacaagcaggtgacgtggaggagaatcccgggcctactagtatggactggatttggcgcatccttttccttgtcggcgctgctaccggcgcgcattccttcgaagttcagctggttgaatctggcggcggactggttcaacctggcggatctctgagactgagctgtgccgcctctggctacgcctttagcagctactgggtcaactgggttcgacaggcccctggcaaaggactggaatgggtcgcccaaatctatcccggcgacggcgacaccaactacaacggcaagttcaagggcagattcaccatcagccgggacaacagcaagaacaccctgtacctccagatgaactccctgagagccgaggacaccgccgtgtactattgtgccagatccatcaccaccgtcgtgggctgcgctatggattattggggccagggaaccctggtcaccgtgtcctctacgcgtgcctctacaaagggaccctccgtgtttcctctggctcccagcagcaagtctacaagcggaggaacagccgctctgggctgcctggtcaaggattactttcccgagcctgtgaccgtgtcctggaatagcggagcactgacaagcggcgtgcacacctttccagccgtgctgcaaagcagcggcctgtactctctgagcagcgtggtcacagtgcctagctctagcctgggcacccagacctacatctgcaatgtgaaccacaagcctagcaacaccaaggtggacaagagagtggaacccaagagctgtggtacccagagttttgggttgttggaccctaaattgtgctatctgttggacggaatcctgttcatttacggagtgatcctgaccgcattgttcctgcgggttaagttttccagatccgcagacgcacccgcttaccaacaagggcagaaccaactctacaatgaacttaatttggggcggagggaagagtacgacgttctggacaaaaggaggggacgagatcccgagatgggcggaaagcctcagcgaaggaagaatccgcaagaggggctttataacgaactccagaaagataaaatggcagaagcctatagtgagattgggatgaagggagaaaggaggaggggtaaaggtcacgatgggttgtaccaaggattgagcacagccactaaagatacctatgatgcgctccacatgcaggccctgccgccaagataa

SEQ ID NO: 8908 - DNA, 3717 bp, synthetic construct
  source 1..3717: mol_type = other DNA
atggccttaccagtgaccgccttgctcctgccgctggccttgctgctccacgccgccaggccgagctacgtgctgacacagcctccatccgtgtctgtggctccaggacagaccgccagaatcacatgcggcggcaacaacatcggcagcaagagcgtgcactggtatcagcagccacctggacaggctccagtggtggtggtgtacgacgacagcgatagacctagcggcatccccgagagattcagcggcagcaattccggcaataccgccacactgaccatcagcagagtggaagctggcgacgaggccgtgtactactgccaagtgtgggacagcagcagcgatcacgtggtgtttggcggcggaacaaagctgacagtgcttctcgaggacctgaagaacgtgttcccacctgaggtggccgtgttcgagcctagcgaggccgagatcagccacacccagaaagccaccctcgtgtgcctggctaccggcttctaccccgaccatgtggaactgtcttggtgggtcaacggcaaagaggtgcacagcggcgtgtctaccgacccccagccactgaaagaacagcccgccctgaacgacagccggtactgcctgagcagcagactgagagtgtccgccaccttctggcagaacccccggaaccacttcagatgccaggtgcagttctacggcctgagcgagaacgacgagtggacccaggacagagccaagcccgtgacccagatcgtgtctgccgaagcctggggcagagccgattgcggatcccagagcttcggcctgctggaccccaagctgtgctacctgctggatggcatcctgttcatctacggcgtgatcctgaccgccctgttcctgaggagtaagaggagcaggctcctgcacagtgactacatgaacatgactccacgccgccccggacccacccgcaagcattaccagccctatgccccaccacgcgacttcgcagcctatcgctccagagtgaagttcagcagaagcgccgacgcccctgcctaccagcagggacagaaccaactgtacaacgagctgaacctgggcagacgggaagagtacgacgtgctggacaagcggagaggcagggaccctgagatgggcggaaagccccggagaaagaacccccaggaaggactgtataacgaactccagaaagacaagatggccgaagcctacagcgagatcggcatgaagggcgagcggagaagaggcaagggccacgatggcctgtaccagggcctgagcaccgccaccaaggacacctatgacgccctgcacatgcaggccctgcctccaagaagggccaagcgatctggatctggagcaacaaacttctcactactcaaacaagcaggtgacgtggaggagaatcccgggcctactagtatggactggatttggcgcatccttttccttgtcggcgctgctaccggcgcgcattccttcgaacaactccagctgcaagagtctggccctggcctggtcaagcctagcgaaacactgagcctgacctgtaccgtgtctggcggctctatcagctccggcagctatttctggggctggatcagacaacctcctggcaaaggactggaatggatcggctccatctactacagcggcatcacctactacaaccccagcctgaagtccagagtgaccatctccgtggacaccagcaagaaccagttctccctgaagctgagcagcgtgacagccgccgataccgccgtgtattattgtgccagacatgacggcgctgtggccggcctgtttgattattggggacagggcaccctggtcaccgtgtcatctgctacgcgtatccagaaccctgatcctgccgtgtaccagctgcgggatagcaagagcagcgacaagagcgtgtgtctgttcaccgacttcgacagccagaccaacgtgtcccagagcaaggactccgacgtgtacatcaccgataagaccgtgctggacatgcggagcatggacttcaagagcaactccgccgtggcctggtccaacaagtccgatttcgcctgcgccaacgccttcaacaacagcattatccccgaggacacattcttcccaagccccgagagcagctgcggtacccagagttttgggttgttggaccctaaattgtgctatctgttggacggaatcctgttcatttacggagtgatcctgaccgcattgttcctgcgggttaagttttccagatccgcagacgcacccgcttaccaacaagggcagaaccaactctacaatgaacttaatttggggcggagggaagagtacgacgttctggacaaaaggaggggacgagatcccgagatgggcggaaagcctcgaaggaagaatccgcaagaggggctttataacgaactccagaaagataaaatggcagaagcctatagtgagattgggatgaagggagaaaggaggaggggtaaaggtcacgatgggttgtaccaaggattgagcacagccactaaagatacctatgatgcgctccacatgcaggccctgccgccaagaaacatctatgatgcctttgttatctactcaagccaggatgaggactgggtaaggaatgagctagtaaagaatttagaagaaggggtgcctccatttcagctctgccttcactacagagactttattcccggtgtggccattgctgccaacatcatccatgaaggtttccataaaagccgaaaggtgattgttgtggtgtcccagcacttcatccagagccgctggtgtatctttgaatatgagattgctcagacctggcagtttctgagcagtcgtgctggtatcatcttcattgtcctgcagaaggtggagaagaccctgctcaggcagcaggtggagctgtaccgccttctcagcaggaacacttacctggagtgggaggacagtgtcctggggcggcacatcttctggagacgactcagaaaagccctgctggatggtcgcgccaagagaagcggatctggcgtgaagcagaccctgaatttcgacctgctgaagctggctggcgacgtggaatccaacccaggcccttctagaggccatatgaccgagtacaagcccacggtgcgcctcgccacccgcgacgacgtccccagggccgtacgcaccctcgccgccgcgttcgccgactaccccgccacgcgccacaccgtcgatccggaccgccacatcgagcgggtcaccgagctgcaagaactcttcctcacgcgcgtcgggctcgacatcggcaaggtgtgggtcgcggacgacggcgccgcggtggcggtctggaccacgccggagagcgtcgaagcgggggcggtgttcgccgagatcggcccgcgcatggccgagttgagcggttcccggctggccgcgcagcaacagatggaaggcctcctggcgccgcaccggcccaaggagcccgcgtggttcctggccaccgtcggcgtctcgcccgaccaccagggcaagggtctgggcagcgccgtcgtgctccccggagtggaggcggccgagcgcgccggggtgcccgccttcctggagacctccgcgccccgcaacctccccttctacgagcggctcggcttcaccgtcaccgccgacgtcgaggtgcccgaaggaccgcgcacctggtgcatgacccgcaagcccggtgcctga

SEQ ID NO: 8909 - DNA, 2196 bp, synthetic construct
  source 1..2196: mol_type = other DNA
atggccttaccagtgaccgccttgctcctgccgctggccttgctgctccacgccgccaggccggacatccagatgacacagagccctagcagcctgtctgccagcgtgggagacagagtgaccatcacatgcaaggccagcgaccacatcaacaactggctggcctggtatcagcagaagcctggcaaggcccctaagctgctgatctacggcgctaccacactggaaacaggcgtgcccagcagattttctggcagcggctctggcaccgacttcaccctgacaatatccagcctccagcctgaggacttcgccacctactactgtcagcagagctggaacaccccttggacattcggccagggcaccaaggtggaaatcaagagactcgagggacagcctaaggccaatcctaccgtgacactgttccctccaagcagcgaagaactccaggccaacaaggccacacttgtgtgcctgatctccgacttctaccctggggctgtgacagtggcttggaaggccgatggatctcctgtgaaagccggcgtggaaaccaccaagccatccaagcagagcaacaacaaatacgccgccagctcctacctgagcctgacacctgagcagtggaagtcccacagatcctacagctgccaagtgacccacgaaggcagcaccgtggaaaagacagtggcccctacagagtgcagcggatcccagagcttcggcctgctggaccccaagctgtgctacctgctggatggcatcctgttcatctacggcgtgatcctgaccgccctgttcctgagagtgaagttcagcagaagcgccgacgcccctgcctaccagcagggacagaaccaactgtacaacgagctgaacctgggcagacgggaagagtacgacgtgctggacaagcggagaggcagggaccctgagatgggcggaaagccccagcggagaaagaacccccaggaaggactgtataacgaactccagaaagacaagatggccgaagcctacagcgagatcggcatgaagggcgagcggagaagaggcaagggccacgatggcctgtaccagggcctgagcaccgccaccaaggacacctatgacgccctgcacatgcaggccctgcctccaagaagggccaagcgatctggatctggagcaacaaacttctcactactcaaacaagcaggtgacgtggaggagaatcccgggcctactagtatggactggatttggcgcatccttttccttgtcggcgctgctaccggcgcgcattccttcgaagttcagctggttgaatctggcggcggactggttcaacctggcggatctctgagactgagctgtgccgcctctggctacgcctttagcagctactgggtcaactgggttcgacaggcccctggcaaaggactggaatgggtcgcccaaatctatcccggcgacggcgacaccaactacaacggcaagttcaagggcagattcaccatcagccgggacaacagcaagaacaccctgtacctccagatgaactccctgagagccgaggacaccgccgtgtactattgtgccagatccatcaccaccgtcgtgggctgcgctatggattattggggccagggaaccctggtcaccgtgtcctctacgcgtgcctctacaaagggaccctccgtgtttcctctggctcccagcagcaagtctacaagcggaggaacagccgctctgggctgcctggtcaaggattactttcccgagcctgtgaccgtgtcctggaatagcggagcactgacaagcggcgtgcacacctttccagccgtgctgcaaagcagcggcctgtactctctgagcagcgtggtcacagtgcctagctctagcctgggcacccagacctacatctgcaatgtgaaccacaagcctagcaacaccaaggtggacaagagagtggaacccaagagctgtggtacccagagttttgggttgttggaccctaaattgtgctatctgttggacggaatcctgttcatttacggagtgatcctgaccgcattgttcctgaagagaggccggaagaagctgctgtacatcttcaagcagcctttcatgcggcccgtgcagaccacccaggaagaggacggctgctcctgccggttccccgaggaagaagaaggcggctgcgagctgtaa

SEQ ID NO: 8910 - DNA, 2406 bp, synthetic construct
  source 1..2406: mol_type = other DNA
atggccttaccagtgaccgccttgctcctgccgctggccttgctgctccacgccgccaggccggacatccagatgacacagagccctagcagcctgtctgccagcgtgggagacagagtgaccatcacatgcaaggccagcgaccacatcaacaactggctggcctggtatcagcagaagcctggcaaggcccctaagctgctgatctacggcgctaccacactggaaacaggcgtgcccagcagattttctggcagcggctctggcaccgacttcaccctgacaatatccagcctccagcctgaggacttcgccacctactactgtcagcagagctggaacaccccttggacattcggccagggcaccaaggtggaaatcaagagactcgagggacagcctaaggccaatcctaccgtgacactgttccctccaagcagcgaagaactccaggccaacaaggccacacttgtgtgcctgatctccgacttctaccctggggctgtgacagtggcttggaaggccgatggatctcctgtgaaagccggcgtggaaaccaccaagccatccaagcagagcaacaacaaatacgccgccagctcctacctgagcctgacacctgagcagtggaagtcccacagatcctacagctgccaagtgacccacgaaggcagcaccgtggaaaagacagtggcccctacagagtgcagcggatcccagagcttcggcctgctggaccccaagctgtgctacctgctggatggcatcctgttcatctacggcgtgatcctgaccgccctgttcctgagagtgaagttcagcagaagcgccgacgcccctgcctaccagcagggacagaaccaactgtacaacgagctgaacctgggcagacgggaagagtacgacgtgctggacaagcggagaggcagggaccctgagatgggcggaaagccccggagaaagaacccccaggaaggactgtataacgaactccagaaagacaagatggccgaagcctacagcgagatcggcatgaagggcgagcggagaagaggcaagggccacgatggcctgtaccagggcctgagcaccgccaccaaggacacctatgacgccctgcacatgcaggccctgcctccaagaagggccaagcgatctggatctggagcaacaaacttctcactactcaaacaagcaggtgacgtggaggagaatcccgggcctactagtatggactggatttggcgcatccttttccttgtcggcgctgctaccggcgcgcattccttcgaagttcagctggttgaatctggcggcggactggttcaacctggcggatctctgagactgagctgtgccgcctctggctacgcctttagcagctactgggtcaactgggttcgacaggcccctggcaaaggactggaatgggtcgcccaaatctatcccggcgacggcgacaccaactacaacggcaagttcaagggcagattcaccatcagccgggacaacagcaagaacaccctgtacctccagatgaactccctgagagccgaggacaccgccgtgtactattgtgccagatccatcaccaccgtcgtgggctgcgctatggattattggggccagggaaccctggtcaccgtgtcctctacgcgtgcctctacaaagggaccctccgtgtttcctctggctcccagcagcaagtctacaagcggaggaacagccgctctgggctgcctggtcaaggattactttcccgagcctgtgaccgtgtcctggaatagcggagcactgacaagcggcgtgcacacctttccagccgtgctgcaaagcagcggcctgtactctctgagcagcgtggtcacagtgcctagctctagcctgggcacccagacctacatctgcaatgtgaaccacaagcctagcaacaccaaggtggacaagagagtggaacccaagagctgtggtacccagagttttgggttgttggaccctaaattgtgctatctgttggacggaatcctgttcatttacggagtgatcctgaccgcattgttcctgcgggttaagttttccagatccgcagacgcacccgcttaccaacaagggcagaaccaactctacaatgaacttaatttggggcggagggaagagtacgacgttctggacaaaaggaggggacgagatcccgagatgggcggaaagcctcagcgaaggaagaatccgcaagaggggctttataacgaactccagaaagataaaatggcagaagcctatagtgagattgggatgaagggagaaaggaggaggggtaaaggtcacgatgggttgtaccaaggattgagcacagccactaaagatacctatgatgcgctccacatgcaggccctgccgccaagataa

SEQ ID NO: 8911 - DNA, 3456 bp, synthetic construct
  source 1..3456: mol_type = other DNA
atggccttaccagtgaccgccttgctcctgccgctggccttgctgctccacgccgccaggccggacatccagatgacacagagccctagcagcctgtctgccagcgtgggagacagagtgaccatcacatgcaaggccagcgaccacatcaacaactggctggcctggtatcagcagaagcctggacaggcccctaagctgctgatctacggcgctaccacactggaaacaggcgtgcccagcagattttctggcagcggctctggcaccgactacaccctgacaatatccagcctccagcctgaggacttcgccacctactactgtcagcagagctggaacaccccttggacattcggccagggcaccaagctggaaatcaagagactcgaggacctgaagaacgtgttcccacctgaggtggccgtgttcgagcctagcgaggccgagatcagccacacccagaaagccaccctcgtgtgcctggctaccggcttctaccccgaccatgtggaactgtcttggtgggtcaacggcaaagaggtgcacagcggcgtgtgtaccgacccccagccactgaaagaacagcccgccctgaacgacagccggtactgcctgagcagcagactgagagtgtccgccaccttctggcagaacccccggaaccacttcagatgccaggtgcagttctacggcctgagcgagaacgacgagtggacccaggacagagccaagcccgtgacccagatcgtgtctgccgaagcctggggcagagccgattgcggctttaccagcgagagctaccagcagggcgtgctgagcgccggatcccagagcttcggcctgctggaccccaagctgtgctacctgctggatggcatcctgttcatctacggcgtgatcctgaccgccctgttcctgaggagtaagaggagcaggctcctgcacagtgactacatgaacatgactccacgccgccccggacccacccgcaagcattaccagccctatgccccaccacgcgacttcgcagcctatcgctccagagtgaagttcagcagaagcgccgacgcccctgcctaccagcagggacagaaccaactgtacaacgagctgaacctgggcagacgggaagagtacgacgtgctggacaagcggagaggcagggaccctgagatgggcggaaagccccggagaaagaacccccaggaaggactgtataacgaactccagaaagacaagatggccgaagcctacagcgagatcggcatgaagggcgagcggagaagaggcaagggccacgatggcctgtaccagggcctgagcaccgccaccaaggacacctatgacgccctgcacatgcaggccctgcctccaagaagggccaagcgatctggatctggagcaacaaacttctcactactcaaacaagcaggtgacgtggaggagaatcccgggcctactagtatggactggatttggcgcatccttttccttgtcggcgctgctaccggcgcgcattccttcgaacaagttcagcttcaacagcctggcgctgagctggtcaaacctggcgcttctgtgaagatgagctgcaaagccagcggctacgccttcagcagctactggatcaactggatgaagcagaaacccggccagggactcgaatggatcggccaaatctatcccggcgacggcgacaccaactacaacggcaagttcaagggcagagccacactgaccgccgatacctctagcagcacagcctacatgcagctgagcagcctgaccagcgaagatagcgccgtgtacttctgtgcccggtccatcacaacagtcgtgggctgcgctatggactattggggccagggaacaagcgtgaccgtgtctagtacgcgtatccagaaccctgatcctgccgtgtaccagctgcgggatagcaagagcagcgacaagagcgtgtgtctgttcaccgacttcgacagccagaccaacgtgtcccagagcaaggactccgacgtgtacatcaccgataagtgcgtgctggacatgcggagcatggacttcaagagcaactccgccgtggcctggtccaacaagtccgatttcgcctgcgccaacgccttcaacaacagcattatccccgaggacacattcttcccaagccccgagagcagctgcgacgtgaagctggtggaaaagagcttcgagacagacggtacccagagttttgggttgttggaccctaaattgtgctatctgttggacggaatcctgttcatttacggagtgatcctgaccgcattgttcctgaacatctatgatgcctttgttatctactcaagccaggatgaggactgggtaaggaatgagctagtaaagaatttagaagaaggggtgcctccatttcagctctgccttcactacagagactttattcccggtgtggccattgctgccaacatcatccatgaaggtttccataaaagccgaaaggtgattgttgtggtgtcccagcacttcatccagagccgctggtgtatctttgaatatgagattgctcagacctggcagtttctgagcagtcgtgctggtatcatcttcattgtcctgcagaaggtggagaagaccctgctcaggcagcaggtggagctgtaccgccttctcagcaggaacacttacctggagtgggaggacagtgtcctggggcggcacatcttctggagacgactcagaaaagccctgctggatggtcgcgccaagagaagcggatctggcgtgaagcagaccctgaatttcgacctgctgaagctggctggcgacgtggaatccaacccaggcccttctagaggccatatgaccgagtacaagcccacggtgcgcctcgccacccgcgacgacgtccccagggccgtacgcaccctcgccgccgcgttcgccgactaccccgccacgcgccacaccgtcgatccggaccgccacatcgagcgggtcaccgagctgcaagaactcttcctcacgcgcgtcgggctcgacatcggcaaggtgtgggtcgcggacgacggcgccgcggtggcggtctggaccacgccggagagcgtcgaagcgggggcggtgttcgccgagatcggcccgcgcatggccgagttgagcggttcccggctggccgcgcagcaacagatggaaggcctcctggcgccgcaccggcccaaggagcccgcgtggttcctggccaccgtcggcgtctcgcccgaccaccagggcaagggtctgggcagcgccgtcgtgctccccggagtggaggcggccgagcgcgccggggtgcccgccttcctggagacctccgcgccccgcaacctccccttctacgagcggctcggcttcaccgtcaccgccgacgtcgaggtgcccgaaggaccgcgcacctggtgcatgacccgcaagcccggtgcctga

SEQ ID NO: 8912 - DNA, 3558 bp, synthetic construct
  source 1..3558: mol_type = other DNA
atggccttaccagtgaccgccttgctcctgccgctggccttgctgctccacgccgccaggccggacatccagatgacacagagccctagcagcctgtctgccagcgtgggagacagagtgaccatcacctgtagagccagccaggacgtgaacacagccgtggcttggtatcagcagaagcctggcaaggcccctaagctgctgatctacagcgcctacttcctgtacagcggcgtgcccagcagattcagcggaagcagaagcggcaccgacttcaccctgacaatatccagcctccagcctgaggacttcgccacctactactgccagcagtacagcagatacagccccgtgacctttggacagggcaccaaggtggaaatcaagagactcgagggacagcctaaggccaatcctaccgtgacactgttccctccaagcagcgaagaactccaggccaacaaggccacacttgtgtgcctgatctccgacttctaccctggggctgtgacagtggcttggaaggccgatggatctcctgtgaaagccggcgtggaaaccaccaagccatccaagcagagcaacaacaaatacgccgccagctcctacctgagcctgacacctgagcagtggaagtcccacagatcctacagctgccaagtgacccacgaaggcagcaccgtggaaaagacagtggcccctacagagtgcagcggatcccagagcttcggcctgctggaccccaagctgtgctacctgctggatggcatcctgttcatctacggcgtgatcctgaccgccctgttcctgagagtgaagttcagcagaagcgccgacgcccctgcctaccagcagggacagaaccaactgtacaacgagctgaacctgggcagacgggaagagtacgacgtgctggacaagcggagaggcagggaccctgagatgggcggaaagccccggagaaagaacccccaggaaggactgtataacgaactccagaaagacaagatggccgaagcctacagcgagatcggcatgaagggcgagcggagaagaggcaagggccacgatggcctgtaccagggcctgagcaccgccaccaaggacacctatgacgccctgcacatgcaggccctgcctccaagaagggccaagcgatctggatctggagcaacaaacttctcactactcaaacaagcaggtgacgtggaggagaatcccgggcctactagtgccaccatggactggatttggcgcatccttttccttgtcggcgctgctaccggcgcccattccgccagaagcgaggacagatacagaaaccccaaattcgaagttcagctggttgaaagtggtggcggcctggttcaacctggcggatctctgagactgagctgtgccgccagcggcttcaatgtgtacgcctctggaatgcactgggtccgacaggcccctggcaaaggacttgagtgggtcgccaaaatctaccccgacagcgactacacctattacgccgacagcgtgaagggcagattcaccatcagcgccgacaccagcaagaacaccgcctacctccagatgaactccctgagagccgaggacaccgccgtgtactactgtagcagagacagcagcttctactacgtgtacgctatggactactggggccagggcacactggtcacagtctcttctacgcgtatccagaaccctgatcctgccgtgtaccagctgcgggatagcaagagcagcgacaagagcgtgtgtctgttcaccgacttcgacagccagaccaacgtgtcccagagcaaggactccgacgtgtacatcaccgataagaccgtgctggacatgcggagcatggacttcaagagcaactccgccgtggcctggtccaacaagtccgatttcgcctgcgccaacgccttcaacaacagcattatccccgaggacacattcttcccaagccccgagagcagctgcggtacccagagttttgggttgttggaccctaaattgtgctatctgttggacggaatcctgttcatttacggagtgatcctgaccgcattgttcctgcgggttaagttttccagatccgcagacgcacccgcttaccaacaagggcagaaccaactctacaatgaacttaatttggggcggagggaagagtacgacgttctggacaaaaggaggggacgagatcccgagatgggcggaaagcctcgaaggaagaatccgcaagaggggctttataacgaactccagaaagataaaatggcagaagcctatagtgagattgggatgaagggagaaaggaggaggggtaaaggtcacgatgggttgtaccaaggattgagcacagccactaaagatacctatgatgcgctccacatgcaggccctgccgccaagaaacatctatgatgcctttgttatctactcaagccaggatgaggactgggtaaggaatgagctagtaaagaatttagaagaaggggtgcctccatttcagctctgccttcactacagagactttattcccggtgtggccattgctgccaacatcatccatgaaggtttccataaaagccgaaaggtgattgttgtggtgtcccagcacttcatccagagccgctggtgtatctttgaatatgagattgctcagacctggcagtttctgagcagtcgtgctggtatcatcttcattgtcctgcagaaggtggagaagaccctgctcaggcagcaggtggagctgtaccgccttctcagcaggaacacttacctggagtgggaggacagtgtcctggggcggcacatcttctggagacgactcagaaaagccctgctggatggtcgcgccaagagaagcggatctggcgtgaagcagaccctgaatttcgacctgctgaagctggctggcgacgtggaatccaacccaggcccttctagaggccatatgaccgagtacaagcccacggtgcgcctcgccacccgcgacgacgtccccagggccgtacgcaccctcgccgccgcgttcgccgactaccccgccacgcgccacaccgtcgatccggaccgccacatcgagcgggtcaccgagctgcaagaactcttcctcacgcgcgtcgggctcgacatcggcaaggtgtgggtcgcggacgacggcgccgcggtggcggtctggaccacgccggagagcgtcgaagcgggggcggtgttcgccgagatcggcccgcgcatggccgagttgagcggttcccggctggccgcgcagcaacagatggaaggcctcctggcgccgcaccggcccaaggagcccgcgtggttcctggccaccgtcggcgtctcgcccgaccaccagggcaagggtctgggcagcgccgtcgtgctccccggagtggaggcggccgagcgcgccggggtgcccgccttcctggagacctccgcgccccgcaacctccccttctacgagcggctcggcttcaccgtcaccgccgacgtcgaggtgcccgaaggaccgcgcacctggtgcatgacccgcaagcccggtgcctga

SEQ ID NO: 8913 - DNA, 2196 bp, synthetic construct; identical to SEQ ID NO: 8909
  source 1..2196: mol_type = other DNA

SEQ ID NO: 8914 - DNA, 2166 bp, synthetic construct
  source 1..2166: mol_type = other DNA
atggccttaccagtgaccgccttgctcctgccgctggccttgctgctccacgccgccaggccggacatccagatgacacagagccctagcagcctgtctgccagcgtgggagacagagtgaccatcacatgcaaggccagcgaccacatcaacaactggctggcctggtatcagcagaagcctggcaaggcccctaagctgctgatctacggcgctaccacactggaaacaggcgtgcccagcagattttctggcagcggctctggcaccgacttcaccctgacaatatccagcctccagcctgaggacttcgccacctactactgtcagcagagctggaacaccccttggacattcggccagggcaccaaggtggaaatcaagagactcgagggacagcctaaggccaatcctaccgtgacactgttccctccaagcagcgaagaactccaggccaacaaggccacacttgtgtgcctgatctccgacttctaccctggggctgtgacagtggcttggaaggccgatggatctcctgtgaaagccggcgtggaaaccaccaagccatccaagcagagcaacaacaaatacgccgccagctcctacctgagcctgacacctgagcagtggaagtcccacagatcctacagctgccaagtgacccacgaaggcagcaccgtggaaaagacagtggcccctacagagtgcagcggatcccagagcttcggcctgctggaccccaagctgtgctacctgctggatggcatcctgttcatctacggcgtgatcctgaccgccctgttcctgagagtgaagttcagcagaagcgccgacgcccctgcctaccagcagggacagaaccaactgtacaacgagctgaacctgggcagacgggaagagtacgacgtgctggacaagcggagaggcagggaccctgagatgggcggaaagccccggagaaagaacccccaggaaggactgtataacgaactccagaaagacaagatggccgaagcctacagcgagatcggcatgaagggcgagcggagaagaggcaagggccacgatggcctgtaccagggcctgagcaccgccaccaaggacacctatgacgccctgcacatgcaggccctgcctccaagaagggccaagcgatctggatctggagcaacaaacttctcactactcaaacaagcaggtgacgtggaggagaatcccgggcctactagtatggactggatttggcgcatccttttccttgtcggcgctgctaccggcgcgcattccttcgaagttcagctggttgaatctggcggcggactggttcaacctggcggatctctgagactgagctgtgccgcctctggctacgcctttagcagctactgggtcaactgggttcgacaggcccctggcaaaggactggaatgggtcgcccaaatctatcccggcgacggcgacaccaactacaacggcaagttcaagggcagattcaccatcagccgggacaacagcaagaacaccctgtacctccagatgaactccctgagagccgaggacaccgccgtgtactattgtgccagatccatcaccaccgtcgtgggctgcgctatggattattggggccagggaaccctggtcaccgtgtcctctacgcgtatccagaaccctgatcctgccgtgtaccagctgcgggatagcaagagcagcgacaagagcgtgtgtctgttcaccgacttcgacagccagaccaacgtgtcccagagcaaggactccgacgtgtacatcaccgataagaccgtgctggacatgcggagcatggacttcaagagcaactccgccgtggcctggtccaacaagtccgatttcgcctgcgccaacgccttcaacaacagcattatccccgaggacacattcttcccaagccccgagagcagctgcggtacccagagttttgggttgttggaccctaaattgtgctatctgttggacggaatcctgttcatttacggagtgatcctgaccgcattgttcctgaagagaggccggaagaagctgctgtacatcttcaagcagcctttcatgcggcccgtgcagaccacccaggaagaggacggctgctcctgccggttccccgaggaagaagaaggcggctgcgagctgtaa

SEQ ID NO: 8915 - DNA, 2169 bp, synthetic construct
  source 1..2169: mol_type = other DNA
atggccttaccagtgaccgccttgctcctgccgctggccttgctgctccacgccgccaggccggacatccagatgacacagagccctagcagcctgtctgccagcgtgggagacagagtgaccatcacatgcaaggccagcgaccacatcaacaactggctggcctggtatcagcagaagcctggcaaggcccctaagctgctgatctacggcgctaccacactggaaacaggcgtgcccagcagattttctggcagcggctctggcaccgacttcaccctgacaatatccagcctccagcctgaggacttcgccacctactactgtcagcagagctggaacaccccttggacattcggccagggcaccaaggtggaaatcaagagactcgagggacagcctaaggccaatcctaccgtgacactgttccctccaagcagcgaagaactccaggccaacaaggccacacttgtgtgcctgatctccgacttctaccctggggctgtgacagtggcttggaaggccgatggatctcctgtgaaagccggcgtggaaaccaccaagccatccaagcagagcaacaacaaatacgccgccagctcctacctgagcctgacacctgagcagtggaagtcccacagatcctacagctgccaagtgacccacgaaggcagcaccgtggaaaagacagtggcccctacagagtgcagcggatcccagagcttcggcctgctggaccccaagctgtgctacctgctggatggcatcctgttcatctacggcgtgatcctgaccgccctgttcctgagagtgaagttcagcagaagcgccgacgcccctgcctaccagcagggacagaaccaactgtacaacgagctgaacctgggcagacgggaagagtacgacgtgctggacaagcggagaggcagggaccctgagatgggcggaaagccccagcggagaaagaacccccaggaaggactgtataacgaactccagaaagacaagatggccgaagcctacagcgagatcggcatgaagggcgagcggagaagaggcaagggccacgatggcctgtaccagggcctgagcaccgccaccaaggacacctatgacgccctgcacatgcaggccctgcctccaagaagggccaagcgatctggatctggagcaacaaacttctcactactcaaacaagcaggtgacgtggaggagaatcccgggcctactagtatggactggatttggcgcatccttttccttgtcggcgctgctaccggcgcgcattccttcgaagttcagctggttgaatctggcggcggactggttcaacctggcggatctctgagactgagctgtgccgcctctggctacgcctttagcagctactgggtcaactgggttcgacaggcccctggcaaaggactggaatgggtcgcccaaatctatcccggcgacggcgacaccaactacaacggcaagttcaagggcagattcaccatcagccgggacaacagcaagaacaccctgtacctccagatgaactccctgagagccgaggacaccgccgtgtactattgtgccagatccatcaccaccgtcgtgggctgcgctatggattattggggccagggaaccctggtcaccgtgtcctctacgcgtatccagaaccctgatcctgccgtgtaccagctgcgggatagcaagagcagcgacaagagcgtgtgtctgttcaccgacttcgacagccagaccaacgtgtcccagagcaaggactccgacgtgtacatcaccgataagaccgtgctggacatgcggagcatggacttcaagagcaactccgccgtggcctggtccaacaagtccgatttcgcctgcgccaacgccttcaacaacagcattatccccgaggacacattcttcccaagccccgagagcagctgcggtacccagagttttgggttgttggaccctaaattgtgctatctgttggacggaatcctgttcatttacggagtgatcctgaccgcattgttcctgaagagaggccggaagaagctgctgtacatcttcaagcagcctttcatgcggcccgtgcagaccacccaggaagaggacggctgctcctgccggttccccgaggaagaagaaggcggctgcgagctgtaa

SEQ ID NO: 8916 - DNA, 1596 bp, synthetic construct
  source 1..1596: mol_type = other DNA
atggccttaccagtgaccgccttgctcctgccgctggccttgctgctccacgccgccaggccggcatgcgctagaagcgaagatcggtatcggaaccccaagggtaccggcggaggcggatctggcggcggaggtagcggtggcggaggatctgaattcgacatccagatgacacagagccctagcagcctgtctgccagcgtgggagacagagtgaccatcacatgcaaggccagccaggatgtgggcacagccgtggattggtatcagcagaagcctggcaaggcccctaagctgctgatctactgggccagcacaagacacacaggcgtgcccagcagattttctggcagcggctctggcaccgacttcaccctgacaatatccagcctccagcctgaggacttcgccacctactactgccagcagtacaacagctaccctctgaccttcggccagggcaccaaggtggaaatcaaaagaggcggaggcggatctggcggcggaggtagcggtggcggaggatctgaagtgcagctggttgaatcaggtggcggcctggttcaacctggcggatctctgagactgagctgtgccgccagcggctacacctttaccgagtacacaatccactgggtccgacaggcccctggcaaaggacttgagtgggtcgccaacatcaaccccaacaatggcggcaccacctacaaccagaagttcgaggacagattcaccatcagccgggacaacagcaagaacaccctgtacctccagatgaactccctgagagccgaggacaccgccgtgtactattgtgccagaggctggaacttcgactactggggccagggaacactggtcaccgttagctctacgcgtggaatgaggactgaggatcttcccaaagctgtcgtctttctcgaaccccaatggtatcgggtgctcgaaaaagactctgtgacactgaaatgccaaggggcctactctcccgaggacaactccacacagtggtttcataatgagtccctcatcagctctcaggccagctcttatttcattgatgccgctacagtggacgactccggcgagtatcggtgtcagaccaatctgtctacactgtctgaccccgtgcagcttgaggtccacattggatggttgctcttgcaagccccacgctgggttttcaaagaggaagatccaatccatctgcggtgccacagctggaaaaacaccgctctccacaaagtcacatacctgcaaaatggcaaaggacgcaaatacttccatcacaattccgatttttacattccgaaggctaccctgaaagacagcggcagctatttctgccggggactcgtcggctccaagaatgtgtcctccgaaaccgtgaatatcacgattacccaaggactggctgtgcctacaatctctagcttctttccgcctggataccaagtctccttctgtcttgtgatggtcctcctgtttgctgtggacacaggactgtacttttccgtgaaaacgaacatccgcagctccacacgcgattggaaagatcacaagtttaaatggcgcaaagatccccaggacaagtaa

SEQ ID NO: 8917 - DNA, 1596 bp, synthetic construct; identical to SEQ ID NO: 8916
  source 1..1596: mol_type = other DNA

SEQ ID NO: 8918 - DNA, 1584 bp, synthetic construct
  source 1..1584: mol_type = other DNA
atggccttaccagtgaccgccttgctcctgccgctggccttgctgctccacgccgccaggccggcatgcagaagtgaagatcgctacaggggtaccggcggaggcggatctggcggcggaggtagcggtggcggaggatctgaattcgacatccagatgacacagagccctagcagcctgtctgccagcgtgggagacagagtgaccatcacatgcaaggccagccaggatgtgggcacagccgtggattggtatcagcagaagcctggcaaggcccctaagctgctgatctactgggccagcacaagacacacaggcgtgcccagcagattttctggcagcggctctggcaccgacttcaccctgacaatatccagcctccagcctgaggacttcgccacctactactgccagcagtacaacagctaccctctgaccttcggccagggcaccaaggtggaaatcaaaagaggcggaggcggatctggcggcggaggtagcggtggcggaggatctgaagtgcagctggttgaatcaggtggcggcctggttcaacctggcggatctctgagactgagctgtgccgccagcggctacacctttaccgagtacacaatccactgggtccgacaggcccctggcaaaggacttgagtgggtcgccaacatcaaccccaacaatggcggcaccacctacaaccagaagttcgaggacagattcaccatcagccgggacaacagcaagaacaccctgtacctccagatgaactccctgagagccgaggacaccgccgtgtactattgtgccagaggctggaacttcgactactggggccagggaacactggtcaccgttagctctacgcgtggaatgaggactgaggatcttcccaaagctgtcgtctttctcgaaccccaatggtatcgggtgctcgaaaaagactctgtgacactgaaatgccaaggggcctactctcccgaggacaactccacacagtggtttcataatgagtccctcatcagctctcaggccagctcttatttcattgatgccgctacagtggacgactccggcgagtatcggtgtcagaccaatctgtctacactgtctgaccccgtgcagcttgaggtccacattggatggttgctcttgcaagccccacgctgggttttcaaagaggaagatccaatccatctgcggtgccacagctggaaaaacaccgctctccacaaagtcacatacctgcaaaatggcaaaggacgcaaatacttccatcacaattccgatttttacattccgaaggctaccctgaaagacagcggcagctatttctgccggggactcgtcggctccaagaatgtgtcctccgaaaccgtgaatatcacgattacccaaggactggctgtgcctacaatctctagcttctttccgcctggataccaagtctccttctgtcttgtgatggtcctcctgtttgctgtggacacaggactgtacttttccgtgaaaacgaacatccgcagctccacacgcgattggaaagatcacaagtttaaatggcgcaaagatccccaggacaagtaa

SEQ ID NO: 8919 - DNA, 2949 bp, synthetic construct
  source 1..2949: mol_type = other DNA
atggccttaccagtgaccgccttgctcctgccgctggccttgctgctccacgccgccaggccggcatgcgctagaagcgaagatcggtatcggaaccccaaggaattcgacatccagatgacacagagccctagcagcctgtctgccagcgtgggagacagagtgaccatcacatgcaaggccagccaggatgtgggcacagccgtggattggtatcagcagaagcctggcaaggcccctaagctgctgatctactgggccagcacaagacacacaggcgtgcccagcagattttctggcagcggctctggcaccgacttcaccctgacaatatccagcctccagcctgaggacttcgccacctactactgccagcagtacaacagctaccctctgaccttcggccagggcaccaaggtggaaatcaaaagactcgaggacctgaagaacgtgttcccacctgaggtggccgtgttcgagcctagcgaggccgagatcagccacacccagaaagccaccctcgtgtgcctggctaccggcttctaccccgaccatgtggaactgtcttggtgggtcaacggcaaagaggtgcacagcggcgtgtctaccgacccccagccactgaaagaacagcccgccctgaacgacagccggtactgcctgagcagcagactgagagtgtccgccaccttctggcagaacccccggaaccacttcagatgccaggtgcagttctacggcctgagcgagaacgacgagtggacccaggacagagccaagcccgtgacccagatcgtgtctgccgaagcctggggcagagccgattgcggatcccagagcttcggcctgctggaccccaagctgtgctacctgctggatggcatcctgttcatctacggcgtgatcctgaccgccctgttcctgagagtgaagttcagcagaagcgccgacgcccctgcctaccagcagggacagaaccaactgtacaacgagctgaacctgggcagacgggaagagtacgacgtgctggacaagcggagaggcagggaccctgagatgggcggaaagccccggagaaagaacccccaggaaggactgtataacgaactccagaaagacaagatggccgaagcctacagcgagatcggcatgaagggcgagcggagaagaggcaagggccacgatggcctgtaccagggcctgagcaccgccaccaaggacacctatgacgccctgcacatgcaggccctgcctccaagaagggccaagcgatctggatctggagcaacaaacttctcactactcaaacaagcaggtgacgtggaggagaatcccgggcctactagtatggactggatttggcgcatccttttccttgtcggcgctgctaccggcgcgcattccttcgaagtgcagctggttgaatcaggtggcggcctggttcaacctggcggatctctgagactgagctgtgccgccagcggctacacctttaccgagtacacaatccactgggtccgacaggcccctggcaaaggacttgagtgggtcgccaacatcaaccccaacaatggcggcaccacctacaaccagaagttcgaggacagattcaccatcagccgggacaacagcaagaacaccctgtacctccagatgaactccctgagagccgaggacaccgccgtgtactattgtgccagaggctggaacttcgactactggggccagggaacactggtcaccgttagctctacgcgtatccagaaccctgatcctgccgtgtaccagctgcgggatagcaagagcagcgacaagagcgtgtgtctgttcaccgacttcgacagccagaccaacgtgtcccagagcaaggactccgacgtgtacatcaccgataagaccgtgctggacatgcggagcatggacttcaagagcaactccgccgtggcctggtccaacaagtccgatttcgcctgcgccaacgccttcaacaacagcattatccccgaggacacattcttcccaagccccgagagcagctgcggtaccatcactcaaggtttggcagtgtcaaccatctcatcattctttccacctggctaccaagtgtccttctgcctggtcatggtgctgctgttcgccgtggataccggcctgtacttcagcgtcaagaccaacatccggtccagcaccagagactggaaggaccacaagttcaagtggcggaaggaccctcaggacaagagggccaagcgatctggatctggagcaacaaacttctcactactcaaacaagcaggtgacgtggaggagaatcccgggccttctagaatgtaccggatgcagctgctgagctgtatcgccctgtctctggccctggtcacaaatagcaactgggttaacgtgatctccgacctgaagaagatcgaggacctgatccagtccatgcacatcgacgccacactgtacaccgagagcgacgtgcaccctagctgtaaagtgaccgccatgaagtgctttctgctggaactgcaagtgatctccctggaaagcggcgacgccagcatccacgacaccgtgaagaacctgattatcctggctaacaacagcctgagcagcaacggcaacgtgaccgagtccggctgtaaagagtgcgaggaactggaagagaagaatatcaaagagttcctccagagcttcgtgcacatcgtgcagatgttcatcaacaccagcaagatcgaagtgatgtaccctcctccttacctggacaacgagaagtccaacggcaccatcatccacgtgaagggcaagcacctgtgtccttctccactgttccccggacctagcaagcctttctgggtgctcgttgttgttggcggcgtgctggcctgttacagcctgctggttaccgtggccttcatcatcttttgggtccgaagcaagcggagctaa

SEQ ID NO: 8920 - DNA, 3012 bp, synthetic construct
  source 1..3012: mol_type = other DNA
atggccttaccagtgaccgccttgctcctgccgctggccttgctgctccacgccgccaggccggcatgcgctagaagcgaagatcggtatcggaaccccaaggaattcgacatccagatgacacagagccctagcagcctgtctgccagcgtgggagacagagtgaccatcacatgcaaggccagccaggatgtgggcacagccgtggattggtatcagcagaagcctggcaaggcccctaagctgctgatctactgggccagcacaagacacacaggcgtgcccagcagattttctggcagcggctctggcaccgacttcaccctgacaatatccagcctccagcctgaggacttcgccacctactactgccagcagtacaacagctaccctctgaccttcggccagggcaccaaggtggaaatcaaaagactcgaggacctgaagaacgtgttcccacctgaggtggccgtgttcgagcctagcgaggccgagatcagccacacccagaaagccaccctcgtgtgcctggctaccggcttctaccccgaccatgtggaactgtcttggtgggtcaacggcaaagaggtgcacagcggcgtgtctaccgacccccagccactgaaagaacagcccgccctgaacgacagccggtactgcctgagcagcagactgagagtgtccgccaccttctggcagaacccccggaaccacttcagatgccaggtgcagttctacggcctgagcgagaacgacgagtggacccaggacagagccaagcccgtgacccagatcgtgtctgccgaagcctggggcagagccgattgcggatcccagagcttcggcctgctggaccccaagctgtgctacctgctggatggcatcctgttcatctacggcgtgatcctgaccgccctgttcctgagagtgaagttcagcagaagcgccgacgcccctgcctaccagcagggacagaaccaactgtacaacgagctgaacctgggcagacgggaagagtacgacgtgctggacaagcggagaggcagggaccctgagatgggcggaaagccccggagaaagaacccccaggaaggactgtataacgaactccagaaagacaagatggccgaagcctacagcgagatcggcatgaagggcgagcggagaagaggcaagggccacgatggcctgtaccagggcctgagcaccgccaccaaggacacctatgacgccctgcacatgcaggccctgcctccaagaagggccaagcgatctggatctggagcaacaaacttctcactactcaaacaagcaggtgacgtggaggagaatcccgggcctactagtatggactggatttggcgcatccttttccttgtcggcgctgctaccggcgcgcattccttcgaagtgcagctggttgaatcaggtggcggcctggttcaacctggcggatctctgagactgagctgtgccgccagcggctacacctttaccgagtacacaatccactgggtccgacaggcccctggcaaaggacttgagtgggtcgccaacatcaaccccaacaatggcggcaccacctacaaccagaagttcgaggacagattcaccatcagccgggacaacagcaagaacaccctgtacctccagatgaactccctgagagccgaggacaccgccgtgtactattgtgccagaggctggaacttcgactactggggccagggaacactggtcaccgttagctctacgcgtatccagaaccctgatcctgccgtgtaccagctgcgggatagcaagagcagcgacaagagcgtgtgtctgttcaccgacttcgacagccagaccaacgtgtcccagagcaaggactccgacgtgtacatcaccgataagaccgtgctggacatgcggagcatggacttcaagagcaactccgccgtggcctggtccaacaagtccgatttcgcctgcgccaacgccttcaacaacagcattatccccgaggacacattcttcccaagccccgagagcagctgcggtaccatcactcaaggtttggcagtgtcaaccatctcatcattctttccacctggctaccaagtgtccttctgcctggtcatggtgctgctgttcgccgtggataccggcctgtacttcagcgtcaagaccaacatccggtccagcaccagagactggaaggaccacaagttcaagtggcggaaggaccctcaggacaagagggccaagcgatctggatctggagcaacaaacttctcactactcaaacaagcaggtgacgtggaggagaatcccgggccttctagaatgtaccggatgcagctgctgagctgtatcgccctgtctctggccctggtcacaaatagcgcccctaccagcagcagcaccaagaaaacccagctgcaactggaacacctcctgctggacctccagatgatcctgaacggcatcaacaactacaagaaccccaagctgacccggatgctgaccttcaagttctacatgcccaagaaggccaccgagctgaagcacctccagtgcctggaagaggaactgaagcccctggaagaagtgctgaatctggcccagagcaagaacttccacctgaggccaagggacctgatctccaacatcaacgtgatcgtgctggaactgaaaggcagcgagacaaccttcatgtgcgagtacgccgacgagacagctaccatcgtggaatttctgaatcggtggatcaccttctgccagagcatcatcagcaccctgacagcgcgtaaaattgaagttatgtatcctcctccttacctagacaatgagaagagcaatggaaccattatccatgtgaaagggaaacacctttgtccaagtcccctatttcccggaccttctaagcccttttgggtgctggtggtggttgggggagtcctggcttgctatagcttgctagtaacagtggcctttattattttctgggtgaggagtaagaggagctaa

SEQ ID NO: 8921 - DNA, 3000 bp, synthetic construct
  source 1..3000: mol_type = other DNA
atggccttaccagtgaccgccttgctcctgccgctggccttgctgctccacgccgccaggccggacatccagatgacacagagccctagcagcctgtctgccagcgtgggagacagagtgaccatcacatgcaaggccagccaggatgtgggcacagccgtggattggtatcagcagaagcctggcaaggcccctaagctgctgatctactgggccagcacaagacacacaggcgtgcccagcagattttctggcagcggctctggcaccgacttcaccctgacaatatccagcctccagcctgaggacttcgccacctactactgccagcagtacaacagctaccctctgaccttcggccagggcaccaaggtggaaatcaaaagactcgaggacctgaagaacgtgttcccacctgaggtggccgtgttcgagcctagcgaggccgagatcagccacacccagaaagccaccctcgtgtgcctggctaccggcttctaccccgaccatgtggaactgtcttggtgggtcaacggcaaagaggtgcacagcggcgtgtctaccgacccccagccactgaaagaacagcccgccctgaacgacagccggtactgcctgagcagcagactgagagtgtccgccaccttctggcagaacccccggaaccacttcagatgccaggtgcagttctacggcctgagcgagaacgacgagtggacccaggacagagccaagcccgtgacccagatcgtgtctgccgaagcctggggcagagccgattgcggatcccagagcttcggcctgctggaccccaagctgtgctacctgctggatggcatcctgttcatctacggcgtgatcctgaccgccctgttcctgagagtgaagttcagcagaagcgccgacgcccctgcctaccagcagggacagaaccaactgtacaacgagctgaacctgggcagacgggaagagtacgacgtgctggacaagcggagaggcagggaccctgagatgggcggaaagccccggagaaagaacccccaggaaggactgtataacgaactccagaaagacaagatggccgaagcctacagcgagatcggcatgaagggcgagcggagaagaggcaagggccacgatggcctgtaccagggcctgagcaccgccaccaaggacacctatgacgccctgcacatgcaggccctgcctccaagaagggccaagcgatctggatctggagcaacaaacttctcactactcaaacaagcaggtgacgtggaggagaatcccgggcctactagtgccaccatggactggatttggcgcatccttttccttgtcggcgctgctaccggcgcccattccgccagaagcgaggacagatacagaaaccccaaattcgaagtgcagctggttgaatcaggtggcggcctggttcaacctggcggatctctgagactgagctgtgccgccagcggctacacctttaccgagtacacaatccactgggtccgacaggcccctggcaaaggacttgagtgggtcgccaacatcaaccccaacaatggcggcaccacctacaaccagaagttcgaggacagattcaccatcagccgggacaacagcaagaacaccctgtacctccagatgaactccctgagagccgaggacaccgccgtgtactattgtgccagaggctggaacttcgactactggggccagggaacactggtcaccgttagctctacgcgtatccagaaccctgatcctgccgtgtaccagctgcgggatagcaagagcagcgacaagagcgtgtgtctgttcaccgacttcgacagccagaccaacgtgtcccagagcaaggactccgacgtgtacatcaccgataagaccgtgctggacatgcggagcatggacttcaagagcaactccgccgtggcctggtccaacaagtccgatttcgcctgcgccaacgccttcaacaacagcattatccccgaggacacattcttcccaagccccgagagcagctgcggtaccatcactcaaggtttggcagtgtcaaccatctcatcattctttccacctggctaccaagtgtccttctgcctggtcatggtgctgctgttcgccgtggataccggcctgtacttcagcgtcaagaccaacatccggtccagcaccagagactggaaggaccacaagttcaagtggcggaaggaccctcaggacaagagggccaagcgatctggatctggagcaacaaacttctcactactcaaacaagcaggtgacgtggaggagaatcccgggccttctagaatgtaccggatgcagctgctgagctgtatcgccctgtctctggccctggtcacaaatagcgcccctaccagcagcagcaccaagaaaacccagctgcaactggaacacctcctgctggacctccagatgatcctgaacggcatcaacaactacaagaaccccaagctgaccgccatgctgaccaagaagttctacatgcccaagaaggccaccgagctgaagcacctccagtgcctggaagaggaactgaagcccctggaagaagtgctgaatctggcccagagcaagaacttccacctgaggccaagggacctgatctccaacatcaacgtgatcgtgctggaactgaaaggcagcgagacaaccttcatgtgcgagtacgccgacgagacagctaccatcgtggaatttctgaatcggtggatcaccttctgcgccagcatcatcagcaccctgacaaagatcgaagtgatgtaccctcctccttacctggacaacgagaagtccaacggcaccatcatccacgtgaagggcaagcacctgtgtccttctccactgttccccggacctagcaagcctttctgggtgctcgttgttgttggcggcgtgctggcctgttacagcctgctggttaccgtggccttcatcatcttttgggtccgaagcaagcggagctaa

SEQ ID NO: 8922 - DNA, 2175 bp, synthetic construct
  source 1..2175: mol_type = other DNA
atggccttaccagtgaccgccttgctcctgccgctggccttgctgctccacgccgccaggccggacatccagatgacacagagccctagcagcctgtctgccagcgtgggagacagagtgaccatcacatgcaaggccagcgaccacatcaacaactggctggcctggtatcagcagaagcctggcaaggcccctaagctgctgatctacggcgctaccacactggaaacaggcgtgcccagcagattttctggcagcggctctggcaccgacttcaccctgacaatatccagcctccagcctgaggacttcgccacctactactgtcagcagagctggaacaccccttggacattcggccagggcaccaaggtggaaatcaagagactcgagggacagcctaaggccaatcctaccgtgacactgttccctccaagcagcgaagaactccaggccaacaaggccacacttgtgtgcctgatctccgacttctaccctggggctgtgacagtggcttggaaggccgatggatctcctgtgaaagccggcgtggaaaccaccaagccatccaagcagagcaacaacaaatacgccgccagctcctacctgagcctgacacctgagcagtggaagtcccacagatcctacagctgccaagtgacccacgaaggcagcaccgtggaaaagacagtggcccctacagagtgcagcggatcccagagcttcggcctgctggaccccaagctgtgctacctgctggatggcatcctgttcatctacggcgtgatcctgaccgccctgttcctgagagtgaagttcagcagaagcgccgacgcccctgcctaccagcagggacagaaccaactgtacaacgagctgaacctgggcagacgggaagagtacgacgtgctggacaagcggagaggcagggaccctgagatgggcggaaagccccagcggagaaagaacccccaggaaggactgtataacgaactccagaaagacaagatggccgaagcctacagcgagatcggcatgaagggcgagcggagaagaggcaagggccacgatggcctgtaccagggcctgagcaccgccaccaaggacacctatgacgccctgcacatgcaggccctgcctccaagaagggccaagcgatctggatctggagcaacaaacttctcactactcaaacaagcaggtgacgtggaggagaatcccgggcctactagtatggactggatttggcgcatccttttccttgtcggcgctgctaccggcgcgcattccttcgaagttcagctggttgaatctggcggcggactggttcaacctggcggatctctgagactgagctgtgccgcctctggctacgcctttagcagctactgggtcaactgggttcgacaggcccctggcaaaggactggaatgggtcgcccaaatctatcccggcgacggcgacaccaactacaacggcaagttcaagggcagattcaccatcagccgggacaacagcaagaacaccctgtacctccagatgaactccctgagagccgaggacaccgccgtgtactattgtgccagatccatcaccaccgtcgtgggctgcgctatggattattggggccagggaaccctggtcaccgtgtcctctacgcgtgcctctacaaagggaccctccgtgtttcctctggctcccagcagcaagtctacaagcggaggaacagccgctctgggctgcctggtcaaggattactttcccgagcctgtgaccgtgtcctggaatagcggagcactgacaagcggcgtgcacacctttccagccgtgctgcaaagcagcggcctgtactctctgagcagcgtggtcacagtgcctagctctagcctgggcacccagacctacatctgcaatgtgaaccacaagcctagcaacaccaaggtggacaagagagtggaacccaagagctgtggtaccatcactcaaggtttggcagtgtcaaccatctcatcattctttccacctggctaccaagtgtccttctgcctggtcatggtgctgctgttcgccgtggataccggcctgtacttcagcgtcaagaccaacatccggtccagcaccagagactggaaggaccacaagttcaagtggcggaaggacccccaggacaagtaa

SEQ ID NO: 8923 - DNA, 3480 bp, synthetic construct
  source 1..3480: mol_type = other DNA
atggccttaccagtgaccgccttgctcctgccgctggccttgctgctccacgccgccaggccggacatccagatgacacagagccctagcagcctgtctgccagcgtgggagacagagtgaccatcacatgcaaggccagcgaccacatcaacaactggctggcctggtatcagcagaagcctggacaggcccctaagctgctgatctacggcgctaccacactggaaacaggcgtgcccagcagattttctggcagcggctctggcaccgactacaccctgacaatatccagcctccagcctgaggacttcgccacctactactgtcagcagagctggaacaccccttggacattcggccagggcaccaagctggaaatcaagagactcgaggacctgaagaacgtgttcccacctgaggtggccgtgttcgagcctagcgaggccgagatcagccacacccagaaagccaccctcgtgtgcctggctaccggcttctaccccgaccatgtggaactgtcttggtgggtcaacggcaaagaggtgcacagcggcgtgtgtaccgacccccagccactgaaagaacagcccgccctgaacgacagccggtactgcctgagcagcagactgagagtgtccgccaccttctggcagaacccccggaaccacttcagatgccaggtgcagttctacggcctgagcgagaacgacgagtggacccaggacagagccaagcccgtgacccagatcgtgtctgccgaagcctggggcagagccgattgcggctttaccagcgagagctaccagcagggcgtgctgagcgccggatcccagagcttcggcctgctggaccccaagctgtgctacctgctggatggcatcctgttcatctacggcgtgatcctgaccgccctgttcctgaggagtaagaggagcaggctcctgcacagtgactacatgaacatgactccacgccgccccggacccacccgcaagcattaccagccctatgccccaccacgcgacttcgcagcctatcgctccagagtgaagttcagcagaagcgccgacgcccctgcctaccagcagggacagaaccaactgtacaacgagctgaacctgggcagacgggaagagtacgacgtgctggacaagcggagaggcagggaccctgagatgggcggaaagccccggagaaagaacccccaggaaggactgtataacgaactccagaaagacaagatggccgaagcctacagcgagatcggcatgaagggcgagcggagaagaggcaagggccacgatggcctgtaccagggcctgagcaccgccaccaaggacacctatgacgccctgcacatgcaggccctgcctccaagaagggccaagcgatctggatctggagcaacaaacttctcactactcaaacaagcaggtgacgtggaggagaatcccgggcctactagtatggactggatttggcgcatccttttccttgtcggcgctgctaccggcgcgcattccttcgaacaagttcagcttcaacagcctggcgctgagctggtcaaacctggcgcttctgtgaagatgagctgcaaagccagcggctacgccttcagcagctactggatcaactggatgaagcagaaacccggccagggactcgaatggatcggccaaatctatcccggcgacggcgacaccaactacaacggcaagttcaagggcagagccacactgaccgccgatacctctagcagcacagcctacatgcagctgagcagcctgaccagcgaagatagcgccgtgtacttctgtgcccggtccatcacaacagtcgtgggctgcgctatggactattggggccagggaacaagcgtgaccgtgtctagtacgcgtatccagaaccctgatcctgccgtgtaccagctgcgggatagcaagagcagcgacaagagcgtgtgtctgttcaccgacttcgacagccagaccaacgtgtcccagagcaaggactccgacgtgtacatcaccgataagtgcgtgctggacatgcggagcatggacttcaagagcaactccgccgtggcctggtccaacaagtccgatttcgcctgcgccaacgccttcaacaacagcattatccccgaggacacattcttcccaagccccgagagcagctgcgacgtgaagctggtggaaaagagcttcgagacagacggtaccatcactcaaggtttggcagtgtcaaccatctcatcattctttccacctggctaccaagtgtccttctgcctggtcatggtgctgctgttcgccgtggataccggcctgtacttcagcgtcaagaccaacatccggtccagcaccagagactggaaggaccacaagttcaagtggcggaaggaccctcaggacaagtggcgacgcaagcgcaaagaaaagcaaagcgagacaagcccaaaagaatttctcactatatacgaggacgtgaaagatttgaagacgaggcggaatcatgagcaagagcagacatttcctggcgggggctctactatctactcaatgattcaatcccaaagctccgctccgacttcccaagagcccgcttacactctctactcactgatacagccttcaagaaaatcaggctctcggaaacggaatcattccccatccttcaatagtaccatctatgaagtaatcggtaagagtcaacctaaagctcaaaaccccgctcgcttgagccgcaaggagctggaaaacttcgatgtatatagccgcgccaagagaagcggatctggcgtgaagcagaccctgaatttcgacctgctgaagctggctggcgacgtggaatccaacccaggcccttctagaggccatatgaccgagtacaagcccacggtgcgcctcgccacccgcgacgacgtccccagggccgtacgcaccctcgccgccgcgttcgccgactaccccgccacgcgccacaccgtcgatccggaccgccacatcgagcgggtcaccgagctgcaagaactcttcctcacgcgcgtcgggctcgacatcggcaaggtgtgggtcgcggacgacggcgccgcggtggcggtctggaccacgccggagagcgtcgaagcgggggcggtgttcgccgagatcggcccgcgcatggccgagttgagcggttcccggctggccgcgcagcaacagatggaaggcctcctggcgccgcaccggcccaaggagcccgcgtggttcctggccaccgtcggcgtctcgcccgaccaccagggcaagggtctgggcagcgccgtcgtgctccccggagtggaggcggccgagcgcgccggggtgcccgccttcctggagacctccgcgccccgcaacctccccttctacgagcggctcggcttcaccgtcaccgccgacgtcgaggtgcccgaaggaccgcgcacctggtgcatgacccgcaagcccggtgcctga

SEQ ID NO: 8924 - DNA, 2172 bp, synthetic construct
  source 1..2172: mol_type = other DNA
atggccttaccagtgaccgccttgctcctgccgctggccttgctgctccacgccgccaggccggacatccagatgacacagagccctagcagcctgtctgccagcgtgggagacagagtgaccatcacatgcaaggccagcgaccacatcaacaactggctggcctggtatcagcagaagcctggcaaggcccctaagctgctgatctacggcgctaccacactggaaacaggcgtgcccagcagattttctggcagcggctctggcaccgacttcaccctgacaatatccagcctccagcctgaggacttcgccacctactactgtcagcagagctggaacaccccttggacattcggccagggcaccaaggtggaaatcaagagactcgagggacagcctaaggccaatcctaccgtgacactgttccctccaagcagcgaagaactccaggccaacaaggccacacttgtgtgcctgatctccgacttctaccctggggctgtgacagtggcttggaaggccgatggatctcctgtgaaagccggcgtggaaaccaccaagccatccaagcagagcaacaacaaatacgccgccagctcctacctgagcctgacacctgagcagtggaagtcccacagatcctacagctgccaagtgacccacgaaggcagcaccgtggaaaagacagtggcccctacagagtgcagcggatcccagagcttcggcctgctggaccccaagctgtgctacctgctggatggcatcctgttcatctacggcgtgatcctgaccgccctgttcctgagagtgaagttcagcagaagcgccgacgcccctgcctaccagcagggacagaaccaactgtacaacgagctgaacctgggcagacgggaagagtacgacgtgctggacaagcggagaggcagggaccctgagatgggcggaaagccccggagaaagaacccccaggaaggactgtataacgaactccagaaagacaagatggccgaagcctacagcgagatcggcatgaagggcgagcggagaagaggcaagggccacgatggcctgtaccagggcctgagcaccgccaccaaggacacctatgacgccctgcacatgcaggccctgcctccaagaagggccaagcgatctggatctggagcaacaaacttctcactactcaaacaagcaggtgacgtggaggagaatcccgggcctactagtatggactggatttggcgcatccttttccttgtcggcgctgctaccggcgcgcattccttcgaagttcagctggttgaatctggcggcggactggttcaacctggcggatctctgagactgagctgtgccgcctctggctacgcctttagcagctactgggtcaactgggttcgacaggcccctggcaaaggactggaatgggtcgcccaaatctatcccggcgacggcgacaccaactacaacggcaagttcaagggcagattcaccatcagccgggacaacagcaagaacaccctgtacctccagatgaactccctgagagccgaggacaccgccgtgtactattgtgccagatccatcaccaccgtcgtgggctgcgctatggattattggggccagggaaccctggtcaccgtgtcctctacgcgtgcctctacaaagggaccctccgtgtttcctctggctcccagcagcaagtctacaagcggaggaacagccgctctgggctgcctggtcaaggattactttcccgagcctgtgaccgtgtcctggaatagcggagcactgacaagcggcgtgcacacctttccagccgtgctgcaaagcagcggcctgtactctctgagcagcgtggtcacagtgcctagctctagcctgggcacccagacctacatctgcaatgtgaaccacaagcctagcaacaccaaggtggacaagagagtggaacccaagagctgtggtaccatcactcaaggtttggcagtgtcaaccatctcatcattctttccacctggctaccaagtgtccttctgcctggtcatggtgctgctgttcgccgtggataccggcctgtacttcagcgtcaagaccaacatccggtccagcaccagagactggaaggaccacaagttcaagtggcggaaggacccccaggacaagtaa

SEQ ID NO: 8925 - DNA, 2571 bp, synthetic construct
  source 1..2571: mol_type = other DNA
atggccttaccagtgaccgccttgctcctgccgctggccttgctgctccacgccgccaggccggacgacatcgtgatgacacagagccctgatagcctggccgtgtctctgggagagagagccaccattaactgcaaggccagccagagcgtggactacgacggcgacagcttcctgaactggtatcagcagaagcccggccagcctcctaagctgctgatctacgccgccagcaatctggaaagcggcgtgccaagcagattttccggctctggcagcggcaccgatttcaccctgacaatatccagcctccagcctgaggacgtggccgtgtactactgccagcagagcaacgacgaccctctgacctttggacagggcaccaaggtggaaatcaaactcgaggacctgaagaacgtgttcccacctgaggtggccgtgttcgagcctagcgaggccgagatcagccacacccagaaagccaccctcgtgtgcctggctaccggcttctaccccgaccatgtggaactgtcttggtgggtcaacggcaaagaggtgcacagcggcgtgtgtaccgacccccagccactgaaagaacagcccgccctgaacgacagccggtactgcctgagcagcagactgagagtgtccgccaccttctggcagaacccccggaaccacttcagatgccaggtgcagttctacggcctgagcgagaacgacgagtggacccaggacagagccaagcccgtgacccagatcgtgtctgccgaagcctggggcagagccgattgcggctttaccagcgagagctaccagcagggcgtgctgagcgcctactacatgtacttgttgctgctgctgaagtccgtggtgtacttcgccatcatcacatgctgcctgctgcggagaaccgccttctgctgcaacggcgagaagtctagggccaagcgatctggatctggagcaacaaacttctcactactcaaacaagcaggtgacgtggaggagaatcccgggcctactagtatggactggatttggcgcatccttttccttgtcggcgctgctaccggcgcgcattccttcgaagaagtccaacttgtggagtctggagggggcctggtgcagcccggcggctctctcagactgtcttgtgcggcaagcggctacaccttcacctcttactggatagaatgggtgaggcaggcacctggaaagggactggagtggattggagagattctgccaggagggggagatacaaattacaatgaaatcttcaaggggcgggccaccttttcagcggataccagcaagaatacagcttacctgcagatgaatagcctccgggcagaagataccgctgtttattattgcacgagacgggtgccaataagactggactattgggggcaagggactcttgtcaccgtcagttcaacgcgtatccagaaccctgatcctgccgtgtaccagctgcgggatagcaagagcagcgacaagagcgtgtgtctgttcaccgacttcgacagccagaccaacgtgtcccagagcaaggactccgacgtgtacatcaccgataagtgcgtgctggacatgcggagcatggacttcaagagcaactccgccgtggcctggtccaacaagtccgatttcgcctgcgccaacgccttcaacaacagcattatccccgaggacacattcttcccaagccccgagagcagctgcgacgtgaagctggtggaaaagagcttcgagacagacaccaacctgaacttccagaacctgagcgtgatcggcttcagaatcctgctgctgaaagtggccggctttaacctgctgatgaccctgcggctgtggtccagccgcgccaagagaagcggatctggcgtgaagcagaccctgaatttcgacctgctgaagctggctggcgacgtggaatccaacccaggcccttctagaggccatatgaccgagtacaagcccacggtgcgcctcgccacccgcgacgacgtccccagggccgtacgcaccctcgccgccgcgttcgccgactaccccgccacgcgccacaccgtcgatccggaccgccacatcgagcgggtcaccgagctgcaagaactcttcctcacgcgcgtcgggctcgacatcggcaaggtgtgggtcgcggacgacggcgccgcggtggcggtctggaccacgccggagagcgtcgaagcgggggcggtgttcgccgagatcggcccgcgcatggccgagttgagcggttcccggctggccgcgcagcaacagatggaaggcctcctggcgccgcaccggcccaaggagcccgcgtggttcctggccaccgtcggcgtctcgcccgaccaccagggcaagggtctgggcagcgccgtcgtgctccccggagtggaggcggccgagcgcgccggggtgcccgccttcctggagacctccgcgccccgcaacctccccttctacgagcggctcggcttcaccgtcaccgccgacgtcgaggtgcccgaaggaccgcgcacctggtgcatgacccgcaagcccggtgcctga

SEQ ID NO: 8926 - DNA, 2571 bp, synthetic construct
  source 1..2571: mol_type = other DNA
atggccttaccagtgaccgccttgctcctgccgctggccttgctgctccacgccgccaggccggacatccagttgacccagtcccccagctcactcagcgccagtgtgggggaccgggtgaccattacctgtaaagccagtcagagtgtggactatgacggggatagcttcctgaattggtatcagcagaagcctggcaaagccccaaagctgctgatctacgctgcatctaatctggagtcaggcgtgccttccaggttctccggtagtgggtctgggaccgatttcacattgaccatttcatccctccaacccgaggatttcgctacatattactgtcagcagtccaatgaggaccctctcacctttggccagggcaccaaagttgaaattaagagactcgaggacctgaagaacgtgttcccacctgaggtggccgtgttcgagcctagcgaggccgagatcagccacacccagaaagccaccctcgtgtgcctggctaccggcttctaccccgaccatgtggaactgtcttggtgggtcaacggcaaagaggtgcacagcggcgtgtgtaccgacccccagccactgaaagaacagcccgccctgaacgacagccggtactgcctgagcagcagactgagagtgtccgccaccttctggcagaacccccggaaccacttcagatgccaggtgcagttctacggcctgagcgagaacgacgagtggacccaggacagagccaagcccgtgacccagatcgtgtctgccgaagcctggggcagagccgattgcggctttaccagcgagagctaccagcagggcgtgctgagcgcctactacatgtacttgttgctgctgctgaagtccgtggtgtacttcgccatcatcacatgctgcctgctgcggagaaccgccttctgctgcaacggcgagaagtctagggccaagcgatctggatctggagcaacaaacttctcactactcaaacaagcaggtgacgtggaggagaatcccgggcctactagtatggactggatttggcgcatccttttccttgtcggcgctgctaccggcgcgcattccttcgaagaagtccaacttgtggagtctggagggggcctggtgcagcccggcggctctctcagactgtcttgtgcggcaagcggctacaccttcacctcttactggatagaatgggtgaggcaggcacctggaaagggactggagtggattggagagattctgccaggagggggagatacaaattacaatgaaatcttcaaggggcgggccaccttttcagcggataccagcaagaatacagcttacctgcagatgaatagcctccgggcagaagataccgctgtttattattgcacgagacgggtgccaataagactggactattgggggcaagggactcttgtcaccgtcagttcaacgcgtatccagaaccctgatcctgccgtgtaccagctgcgggatagcaagagcagcgacaagagcgtgtgtctgttcaccgacttcgacagccagaccaacgtgtcccagagcaaggactccgacgtgtacatcaccgataagtgcgtgctggacatgcggagcatggacttcaagagcaactccgccgtggcctggtccaacaagtccgatttcgcctgcgccaacgccttcaacaacagcattatccccgaggacacattcttcccaagccccgagagcagctgcgacgtgaagctggtggaaaagagcttcgagacagacaccaacctgaacttccagaacctgagcgtgatcggcttcagaatcctgctgctgaaagtggccggctttaacctgctgatgaccctgcggctgtggtccagccgcgccaagagaagcggatctggcgtgaagcagaccctgaatttcgacctgctgaagctggctggcgacgtggaatccaacccaggcccttctagaggccatatgaccgagtacaagcccacggtgcgcctcgccacccgcgacgacgtccccagggccgtacgcaccctcgccgccgcgttcgccgactaccccgccacgcgccacaccgtcgatccggaccgccacatcgagcgggtcaccgagctgcaagaactcttcctcacgcgcgtcgggctcgacatcggcaaggtgtgggtcgcggacgacggcgccgcggtggcggtctggaccacgccggagagcgtcgaagcgggggcggtgttcgccgagatcggcccgcgcatggccgagttgagcggttcccggctggccgcgcagcaacagatggaaggcctcctggcgccgcaccggcccaaggagcccgcgtggttcctggccaccgtcggcgtctcgcccgaccaccagggcaagggtctgggcagcgccgtcgtgctccccggagtggaggcggccgagcgcgccggggtgcccgccttcctggagacctccgcgccccgcaacctccccttctacgagcggctcggcttcaccgtcaccgccgacgtcgaggtgcccgaaggaccgcgcacctggtgcatgacccgcaagcccggtgcctga

SEQ ID NO: 8927 - DNA, 2568 bp, synthetic construct
  source 1..2568: mol_type = other DNA
atggccttaccagtgaccgccttgctcctgccgctggccttgctgctccacgccgccaggccggacatccagttgacccagtcccccagctcactcagcgccagtgtgggggaccgggtgaccattacctgtaaagccagtcagagtgtggactatgacggggatagcttcctgaattggtatcagcagaagcctggcaaagccccaaagctgctgatctacgctgcatctaatctggagtcaggcgtgccttccaggttctccggtagtgggtctgggaccgatttcacattgaccatttcatccctccaacccgaggatttcgctacatattactgtcagcagtccaatgaggaccctctcacctttggccagggcaccaaagttgaaattaagagactcgaggacctgaagaacgtgttcccacctgaggtggccgtgttcgagcctagcgaggccgagatcagccacacccagaaagccaccctcgtgtgcctggctaccggcttctaccccgaccatgtggaactgtcttggtgggtcaacggcaaagaggtgcacagcggcgtgtgtaccgacccccagccactgaaagaacagcccgccctgaacgacagccggtactgcctgagcagcagactgagagtgtccgccaccttctggcagaacccccggaaccacttcagatgccaggtgcagttctacggcctgagcgagaacgacgagtggacccaggacagagccaagcccgtgacccagatcgtgtctgccgaagcctggggcagagccgattgcggctttaccagcgagagctaccagcagggcgtgctgagcgcctactacatgtacttgttgctgctgctgaagtccgtggtgtacttcgccatcatcacatgctgcctgctgcggagaaccgccttctgctgcaacggcgagaagtctagggccaagcgatctggatctggagcaacaaacttctcactactcaaacaagcaggtgacgtggaggagaatcccgggcctactagtatggactggatttggcgcatccttttccttgtcggcgctgctaccggcgcgcattccttcgaagtccaacttgtggagtctggagggggcctggtgcagcccggcggctctctcagactgtcttgtgcggcaagcggctacaccttcagctcttactggatagaatgggtgaggcaggcacctggaaagggactggagtggattggagagattctgccaggagggggagatacaaattacaatgaaatcttcaaggggcgggccaccttttcagcggataccagcaagaatacagcttacctgcagatgaatagcctccgggcagaagataccgctgtttattattgcacgagacgggtgccaataagactggactattgggggcaagggactcttgtcaccgtcagttcaacgcgtatccagaaccctgatcctgccgtgtaccagctgcgggatagcaagagcagcgacaagagcgtgtgtctgttcaccgacttcgacagccagaccaacgtgtcccagagcaaggactccgacgtgtacatcaccgataagtgcgtgctggacatgcggagcatggacttcaagagcaactccgccgtggcctggtccaacaagtccgatttcgcctgcgccaacgccttcaacaacagcattatccccgaggacacattcttcccaagccccgagagcagctgcgacgtgaagctggtggaaaagagcttcgagacagacaccaacctgaacttccagaacctgagcgtgatcggcttcagaatcctgctgctgaaagtggccggctttaacctgctgatgaccctgcggctgtggtccagccgcgccaagagaagcggatctggcgtgaagcagaccctgaatttcgacctgctgaagctggctggcgacgtggaatccaacccaggcccttctagaggccatatgaccgagtacaagcccacggtgcgcctcgccacccgcgacgacgtccccagggccgtacgcaccctcgccgccgcgttcgccgactaccccgccacgcgccacaccgtcgatccggaccgccacatcgagcgggtcaccgagctgcaagaactcttcctcacgcgcgtcgggctcgacatcggcaaggtgtgggtcgcggacgacggcgccgcggtggcggtctggaccacgccggagagcgtcgaagcgggggcggtgttcgccgagatcggcccgcgcatggccgagttgagcggttcccggctggccgcgcagcaacagatggaaggcctcctggcgccgcaccggcccaaggagcccgcgtggttcctggccaccgtcggcgtctcgcccgaccaccagggcaagggtctgggcagcgccgtcgtgctccccggagtggaggcggccgagcgcgccggggtgcccgccttcctggagacctccgcgccccgcaacctccccttctacgagcggctcggcttcaccgtcaccgccgacgtcgaggtgcccgaaggaccgcgcacctggtgcatgacccgcaagcccggtgcctga

SEQ ID NO: 8928 - DNA, 2589 bp, synthetic construct
  source 1..2589: mol_type = other DNA
atggccttaccagtgaccgccttgctcctgccgctggccttgctgctccacgccgccaggccgagctacgtgctgacacagcctccatccgtgtctgtggctccaggacagaccgccagaatcacatgcggcggcaacaacatcggcggcaagagcgtgcactggtatcagcagccacctggacaggctccagtggtggtggtgtacgacgacagcgatagacctagcggcatccccgagagattcagcggcagcaattccggcaataccgccacactgaccatcagcagagtggaagctggcgacgaggccgtgtactactgccaagtgtgggacagcagcagcgatcacgtggtgtttggcggcggaacaaagctgacagtgcttctcgaggacctgaagaacgtgttcccacctgaggtggccgtgttcgagcctagcgaggccgagatcagccacacccagaaagccaccctcgtgtgcctggctaccggcttctaccccgaccatgtggaactgtcttggtgggtcaacggcaaagaggtgcacagcggcgtgtgtaccgacccccagccactgaaagaacagcccgccctgaacgacagccggtactgcctgagcagcagactgagagtgtccgccaccttctggcagaacccccggaaccacttcagatgccaggtgcagttctacggcctgagcgagaacgacgagtggacccaggacagagccaagcccgtgacccagatcgtgtctgccgaagcctggggcagagccgattgcggctttaccagcgagagctaccagcagggcgtgctgagcgcctactacatgtacttgttgctgctgctgaagtccgtggtgtacttcgccatcatcacatgctgcctgctgcggagaaccgccttctgctgcaacggcgagaagtctagggccaagcgatctggatctggagcaacaaacttctcactactcaaacaagcaggtgacgtggaggagaatcccgggcctactagtatggactggatttggcgcatccttttccttgtcggcgctgctaccggcgcgcattccttcgaacaactccagctgcaagagtctggccctggcctggtcaagcctagcgaaacactgagcctgacctgtaccgtgtctggcggctctatcagctccagcagctatttctggggctggatcagacaacctcctggcaaaggactggaatggatcggctccatctactacagcggcatcacctactacaaccccagcctgaagtccagagtgaccatctccgtggacaccagcaagaaccagttctccctgaagctgagcagcgtgacagccgccgataccgccgtgtattattgtgccagacatgacggcgctgtggccggcctgtttgattattggggacagggcaccctggtcaccgtgtcatctgctacgcgtatccagaaccctgatcctgccgtgtaccagctgcgggatagcaagagcagcgacaagagcgtgtgtctgttcaccgacttcgacagccagaccaacgtgtcccagagcaaggactccgacgtgtacatcaccgataagtgcgtgctggacatgcggagcatggacttcaagagcaactccgccgtggcctggtccaacaagtccgatttcgcctgcgccaacgccttcaacaacagcattatccccgaggacacattcttcccaagccccgagagcagctgcgacgtgaagctggtggaaaagagcttcgagacagacaccaacctgaacttccagaacctgagcgtgatcggcttcagaatcctgctgctgaaagtggccggctttaacctgctgatgaccctgcggctgtggtccagccgcgccaagagaagcggatctggcgtgaagcagaccctgaatttcgacctgctgaagctggctggcgacgtggaatccaacccaggcccttctagaatgtaccggatgcagctgctgagctgtatcgccctgtctctggccctggtcacaaatagcaactgggttaacgtgatctccgacctgaagaagatcgaggacctgatccagtccatgcacatcgacgccacactgtacaccgagagcgacgtgcaccctagctgtaaagtgaccgccatgaagtgctttctgctggaactgcaagtgatctccctggaaagcggcgacgccagcatccacgacaccgtgaagaacctgattatcctggctaacaacagcctgagcagcaacggcaacgtgaccgagtccggctgtaaagagtgcgaggaactggaagagaagaatatcaaagagttcctccagagcttcgtgcacatcgtgcagatgttcatcaacaccagcaagatcgaagtgatgtaccctcctccttacctggacaacgagaagtccaacggcaccatcatccacgtgaagggcaagcacctgtgtccttctccactgttccccggacctagcaagcctttctgggtgctcgttgttgttggcggcgtgctggcctgttacagcctgctggttaccgtggccttcatcatcttttgggtccgaagcaagcggagctaa

SEQ ID NO: 8929 - DNA, 2283 bp, synthetic construct
  source 1..2283: mol_type = other DNA
atggccttaccagtgaccgccttgctcctgccgctggccttgctgctccacgccgccaggccggaagtgcagctggttgaatctggcggaggactggttcaggctggcggatctctgagactgtcttgtgccgccagcggcagaacctttagcatgggctggtttagacaggcccctggcaaagagagagagttcgtcgccgccatcacatactctggcggcagcccttactacgccgactctgtgaagggcagattcaccatcagccgggacaacgccaagaacaccgtgtacctccagatgaacagcctgaagcctgaggacaccgccgtgtactactgcgccgccaatccaacatacggcagcgactggaacgccgagaattggggccagggaacccaagtgacagtgtctagcggtaccggcggaggcggatctggcggcggaggtagcggtggcggaggatctgaattcgacatccagttgacccagtcccccagctcactcagcgccagtgtgggggaccgggtgaccattacctgtaaagccagtcagagtgtggactatgacggggatagcttcctgaattggtatcagcagaagcctggcaaagccccaaagctgctgatctacgctgcatctaatctggagtcaggcgtgccttccaggttctccggtagtgggtctgggaccgatttcacattgaccatttcatccctccaacccgaggatttcgctacatattactgtcagcagtccaatgaggaccctctcacctttggccagggcaccaaagttgaaattaagagactcgaggacctgaagaacgtgttcccacctgaggtggccgtgttcgagcctagcgaggccgagatcagccacacccagaaagccaccctcgtgtgcctggctaccggcttctaccccgaccatgtggaactgtcttggtgggtcaacggcaaagaggtgcacagcggcgtgtgtaccgacccccagccactgaaagaacagcccgccctgaacgacagccggtactgcctgagcagcagactgagagtgtccgccaccttctggcagaacccccggaaccacttcagatgccaggtgcagttctacggcctgagcgagaacgacgagtggacccaggacagagccaagcccgtgacccagatcgtgtctgccgaagcctggggcagagccgattgcggctttaccagcgagagctaccagcagggcgtgctgagcgcctactacatgtacttgttgctgctgctgaagtccgtggtgtacttcgccatcatcacatgctgcctgctgcggagaaccgccttctgctgcaacggcgagaagtctagggccaagcgatctggatctggagcaacaaacttctcactactcaaacaagcaggtgacgtggaggagaatcccgggcctactagtatggactggatttggcgcatccttttccttgtcggcgctgctaccggcgcgcattccttcgaagaagtccaacttgtggagtctggagggggcctggtgcagcccggcggctctctcagactgtcttgtgcggcaagcggctacaccttcacctcttactggatagaatgggtgaggcaggcacctggaaagggactggagtggattggagagattctgccaggagggggagatacaaattacaatgaaatcttcaaggggcgggccaccttttcagcggataccagcaagaatacagcttacctgcagatgaatagcctccgggcagaagataccgctgtttattattgcacgagacgggtgccaataagactggactattgggggcaagggactcttgtcaccgtcagttcaacgcgtatccagaaccctgatcctgccgtgtaccagctgcgggatagcaagagcagcgacaagagcgtgtgtctgttcaccgacttcgacagccagaccaacgtgtcccagagcaaggactccgacgtgtacatcaccgataagtgcgtgctggacatgcggagcatggacttcaagagcaactccgccgtggcctggtccaacaagtccgatttcgcctgcgccaacgccttcaacaacagcattatccccgaggacacattcttcccaagccccgagagcagctgcgacgtgaagctggtggaaaagagcttcgagacagacaccaacctgaacttccagaacctgagcgtgatcggcttcagaatcctgctgctgaaagtggccggctttaacctgctgatgaccctgcggctgtggtccagctaa

SEQ ID NO: 8930 - DNA, 2568 bp, synthetic construct
  source 1..2568: mol_type = other DNA
atggccttaccagtgaccgccttgctcctgccgctggccttgctgctccacgccgccaggccggacatccagttgacccagtcccccagctcactcagcgccagtgtgggggaccgggtgaccattacctgtaaagccagtcagagtgtggactatgacggggatagcttcctgaattggtatcagcagaagcctggcaaagccccaaagctgctgatctacgctgcatctaatctggagtcaggcgtgccttccaggttctccggtagtgggtctgggaccgatttcacattgaccatttcatccctccaacccgaggatttcgctacatattactgtcagcagtccaatgaggaccctctcacctttggccagggcaccaaagttgaaattaagagactcgaggacctgaagaacgtgttcccacctgaggtggccgtgttcgagcctagcgaggccgagatcagccacacccagaaagccaccctcgtgtgcctggctaccggcttctaccccgaccatgtggaactgtcttggtgggtcaacggcaaagaggtgcacagcggcgtgtgtaccgacccccagccactgaaagaacagcccgccctgaacgacagccggtactgcctgagcagcagactgagagtgtccgccaccttctggcagaacccccggaaccacttcagatgccaggtgcagttctacggcctgagcgagaacgacgagtggacccaggacagagccaagcccgtgacccagatcgtgtctgccgaagcctggggcagagccgattgcggctttaccagcgagagctaccagcagggcgtgctgagcgcctactacatgtacttgttgctgctgctgaagtccgtggtgtacttcgccatcatcacatgctgcctgctgcggagaaccgccttctgctgcaacggcgagaagtctagggccaagcgatctggatctggagcaacaaacttctcactactcaaacaagcaggtgacgtggaggagaatcccgggcctactagtatggactggatttggcgcatccttttccttgtcggcgctgctaccggcgcgcattccttcgaagtccaacttgtggagtctggagggggcctggtgcagcccggcggctctctcagactgtcttgtgcggcaagcggctacaccttcacctcttactggatagaatgggtgaggcaggcacctggaaagggactggagtggattggagagattctgccaggagggggagatacaaattacaatgaaatcttcaaggggcgggccaccttttcagcggataccagcaagaatacagcttacctgcagatgaatagcctccgggcagaagataccgctgtttattattgcacgagacgggtgccaataagactggactattgggggcaagggactcttgtcaccgtcagttcaacgcgtatccagaaccctgatcctgccgtgtaccagctgcgggatagcaagagcagcgacaagagcgtgtgtctgttcaccgacttcgacagccagaccaacgtgtcccagagcaaggactccgacgtgtacatcaccgataagtgcgtgctggacatgcggagcatggacttcaagagcaactccgccgtggcctggtccaacaagtccgatttcgcctgcgccaacgccttcaacaacagcattatccccgaggacacattcttcccaagccccgagagcagctgcgacgtgaagctggtggaaaagagcttcgagacagacaccaacctgaacttccagaacctgagcgtgatcggcttcagaatcctgctgctgaaagtggccggctttaacctgctgatgaccctgcggctgtggtccagccgcgccaagagaagcggatctggcgtgaagcagaccctgaatttcgacctgctgaagctggctggcgacgtggaatccaacccaggcccttctagaggccatatgaccgagtacaagcccacggtgcgcctcgccacccgcgacgacgtccccagggccgtacgcaccctcgccgccgcgttcgccgactaccccgccacgcgccacaccgtcgatccggaccgccacatcgagcgggtcaccgagctgcaagaactcttcctcacgcgcgtcgggctcgacatcggcaaggtgtgggtcgcggacgacggcgccgcggtggcggtctggaccacgccggagagcgtcgaagcgggggcggtgttcgccgagatcggcccgcgcatggccgagttgagcggttcccggctggccgcgcagcaacagatggaaggcctcctggcgccgcaccggcccaaggagcccgcgtggttcctggccaccgtcggcgtctcgcccgaccaccagggcaagggtctgggcagcgccgtcgtgctccccggagtggaggcggccgagcgcgccggggtgcccgccttcctggagacctccgcgccccgcaacctccccttctacgagcggctcggcttcaccgtcaccgccgacgtcgaggtgcccgaaggaccgcgcacctggtgcatgacccgcaagcccggtgcctga

SEQ ID NO: 8931 - DNA, 2433 bp, synthetic construct
  source 1..2433: mol_type = other DNA
atggccttaccagtgaccgccttgctcctgccgctggccttgctgctccacgccgccaggccggacatccagttgacccagtcccccagctcactcagcgccagtgtgggggaccgggtgaccattacctgtaaagccagtcagagtgtggactatgacggggatagcttcctgaattggtatcagcagaagcctggcaaagccccaaagctgctgatctacgctgcatctaatctggagtcaggcgtgccttccaggttctccggtagtgggtctgggaccgatttcacattgaccatttcatccctccaacccgaggatttcgctacatattactgtcagcagtccaatgaggaccctctcacctttggccagggcaccaaagttgaaattaagagactcgagacagtggccgccccatctgtattcatctttcctccatctgatgaacagcttaagtccggcactgcttctgttgtttgcctgcttaacaatttttacccgcgggaagccaaggtgcaatggaaagtggacaacgccctgcagtctggtaacagtcaggaaagcgtgactgaacaggacagcaaagactccacatactccttgagttccaccttgacgctcagtaaggcagactacgagaagcacaaggtttatgcctgtgaagtgactcaccagggcctctctagcccagtgactaagtccttcaaccgcggggagtgtaggaagcgacgggggtcaggcgccactaacttctctctgctgaaacaagccggggacgtggaggagaatccaggtcccactagtatggactggatttggcgcatccttttccttgtcggcgctgctaccggcgcgcattccttcgaagaagtccaacttgtggagtctggagggggcctggtgcagcccggcggctctctcagactgtcttgtgcggcaagcggctacaccttcacctcttactggatagaatgggtgaggcaggcacctggaaagggactggagtggattggagagattctgccaggagggggagatacaaattacaatgaaatcttcaaggggcgggccaccttttcagcggataccagcaagaatacagcttacctgcagatgaatagcctccgggcagaagataccgctgtttattattgcacgagacgggtgccaataagactggactattgggggcaagggactcttgtcaccgtcagttcaacgcgtgcctctacaaagggaccctccgtgtttcctctggctccctgtagcagaagcaccagcgaatctacagccgctctgggctgcctggtcaaggactactttcctgagcctgtgaccgtgtcctggaacagcggagcactgacatctggcgtgcacacctttccagccgtgctccaaagcagcggcctgtactctctgagcagcgtggtcacagtgcctagctctagcctgggcaccaagacctacacctgtaatgtggaccacaagcctagcaacaccaaggtggacaagcgcgtgggtaccgaagtgaaaaccgactccaccgaccacgtgaagcccaaagagacagagaacaccaagcagcccagcaagagctgccacaagcccaaggccatcgtgcacaccgagaaagtgaacatgatgagcctgaccgtgctgggcttcagaatcctgctgctgaaagtggccggctttaacctgctgatgaccctgcggctgtggtccagccgcgccaagagaagcggatctggcgtgaagcagaccctgaatttcgacctgctgaagctggctggcgacgtggaatccaacccaggcccttctagaggccatatgaccgagtacaagcccacggtgcgcctcgccacccgcgacgacgtccccagggccgtacgcaccctcgccgccgcgttcgccgactaccccgccacgcgccacaccgtcgatccggaccgccacatcgagcgggtcaccgagctgcaagaactcttcctcacgcgcgtcgggctcgacatcggcaaggtgtgggtcgcggacgacggcgccgcggtggcggtctggaccacgccggagagcgtcgaagcgggggcggtgttcgccgagatcggcccgcgcatggccgagttgagcggttcccggctggccgcgcagcaacagatggaaggcctcctggcgccgcaccggcccaaggagcccgcgtggttcctggccaccgtcggcgtctcgcccgaccaccagggcaagggtctgggcagcgccgtcgtgctccccggagtggaggcggccgagcgcgccggggtgcccgccttcctggagacctccgcgccccgcaacctccccttctacgagcggctcggcttcaccgtcaccgccgacgtcgaggtgcccgaaggaccgcgcacctggtgcatgacccgcaagcccggtgcctga

SEQ ID NO: 8932 - DNA, 2469 bp, synthetic construct
  source 1..2469: mol_type = other DNA
atggccttaccagtgaccgccttgctcctgccgctggccttgctgctccacgccgccaggccggacatccagttgacccagtcccccagctcactcagcgccagtgtgggggaccgggtgaccattacctgtaaagccagtcagagtgtggactatgacggggatagcttcctgaattggtatcagcagaagcctggcaaagccccaaagctgctgatctacgctgcatctaatctggagtcaggcgtgccttccaggttctccggtagtgggtctgggaccgatttcacattgaccatttcatccctccaacccgaggatttcgctacatattactgtcagcagtccaatgaggaccctctcacctttggccagggcaccaaagttgaaattaagagactcgagacagtggccgccccatctgtattcatctttcctccatctgatgaacagcttaagtccggcactgcttctgttgtttgcctgcttaacaatttttacccgcgggaagccaaggtgcaatggaaagtggacaacgccctgcagtctggtaacagtcaggaaagcgtgactgaacaggacagcaaagactccacatactccttgagttccaccttgacgctcagtaaggcagactacgagaagcacaaggtttatgcctgtgaagtgactcaccagggcctctctagcccagtgactaagtccttcaaccgcggggagtgtaggaagcgacgggggtcaggcgccactaacttctctctgctgaaacaagccggggacgtggaggagaatccaggtcccactagtatggactggatttggcgcatccttttccttgtcggcgctgctaccggcgcgcattccttcgaagaagtccaacttgtggagtctggagggggcctggtgcagcccggcggctctctcagactgtcttgtgcggcaagcggctacaccttcacctcttactggatagaatgggtgaggcaggcacctggaaagggactggagtggattggagagattctgccaggagggggagatacaaattacaatgaaatcttcaaggggcgggccaccttttcagcggataccagcaagaatacagcttacctgcagatgaatagcctccgggcagaagataccgctgtttattattgcacgagacgggtgccaataagactggactattgggggcaagggactcttgtcaccgtcagttcaacgcgtgcctctacaaagggaccctccgtgtttcctctggctccctgtagcagaagcaccagcgaatctacagccgctctgggctgcctggtcaaggactactttcctgagcctgtgaccgtgtcctggaacagcggagcactgacatctggcgtgcacacctttccagccgtgctccaaagcagcggcctgtactctctgagcagcgtggtcacagtgcctagctctagcctgggcaccaagacctacacctgtaatgtggaccacaagcctagcaacaccaaggtggacaagcgcgtggaatctaagtacggccctccttgtcctccatgtcctggtaccgaagtgaaaaccgactccaccgaccacgtgaagcccaaagagacagagaacaccaagcagcccagcaagagctgccacaagcccaaggccatcgtgcacaccgagaaagtgaacatgatgagcctgaccgtgctgggcttcagaatcctgctgctgaaagtggccggctttaacctgctgatgaccctgcggctgtggtccagccgcgccaagagaagcggatctggcgtgaagcagaccctgaatttcgacctgctgaagctggctggcgacgtggaatccaacccaggcccttctagaggccatatgaccgagtacaagcccacggtgcgcctcgccacccgcgacgacgtccccagggccgtacgcaccctcgccgccgcgttcgccgactaccccgccacgcgccacaccgtcgatccggaccgccacatcgagcgggtcaccgagctgcaagaactcttcctcacgcgcgtcgggctcgacatcggcaaggtgtgggtcgcggacgacggcgccgcggtggcggtctggaccacgccggagagcgtcgaagcgggggcggtgttcgccgagatcggcccgcgcatggccgagttgagcggttcccggctggccgcgcagcaacagatggaaggcctcctggcgccgcaccggcccaaggagcccgcgtggttcctggccaccgtcggcgtctcgcccgaccaccagggcaagggtctgggcagcgccgtcgtgctccccggagtggaggcggccgagcgcgccggggtgcccgccttcctggagacctccgcgccccgcaacctccccttctacgagcggctcggcttcaccgtcaccgccgacgtcgaggtgcccgaaggaccgcgcacctggtgcatgacccgcaagcccggtgcctga

SEQ ID NO: 8933 - DNA, 2469 bp, synthetic construct
  source 1..2469: mol_type = other DNA
atggccttaccagtgaccgccttgctcctgccgctggccttgctgctccacgccgccaggccggacatccagttgacccagtcccccagctcactcagcgccagtgtgggggaccgggtgaccattacctgtaaagccagtcagagtgtggactatgacggggatagcttcctgaattggtatcagcagaagcctggcaaagccccaaagctgctgatctacgctgcatctaatctggagtcaggcgtgccttccaggttctccggtagtgggtctgggaccgatttcacattgaccatttcatccctccaacccgaggatttcgctacatattactgtcagcagtccaatgaggaccctctcacctttggccagggcaccaaagttgaaattaagagactcgagacagtggccgccccatctgtattcatctttcctccatctgatgaacagcttaagtccggcactgcttctgttgtttgcctgcttaacaatttttacccgcgggaagccaaggtgcaatggaaagtggacaacgccctgcagtctggtaacagtcaggaaagcgtgactgaacaggacagcaaagactccacatactccttgagttccaccttgacgctcagtaaggcagactacgagaagcacaaggtttatgcctgtgaagtgactcaccagggcctctctagcccagtgactaagtccttcaaccgcggggagtgtaggaagcgacgggggtcaggcgccactaacttctctctgctgaaacaagccggggacgtggaggagaatccaggtcccactagtatggactggatttggcgcatccttttccttgtcggcgctgctaccggcgcgcattccttcgaagaagtccaacttgtggagtctggagggggcctggtgcagcccggcggctctctcagactgtcttgtgcggcaagcggctacaccttcacctcttactggatagaatgggtgaggcaggcacctggaaagggactggagtggattggagagattctgccaggagggggagatacaaattacaatgaaatcttcaaggggcgggccaccttttcagcggataccagcaagaatacagcttacctgcagatgaatagcctccgggcagaagataccgctgtttattattgcacgagacgggtgccaataagactggactattgggggcaagggactcttgtcaccgtcagttcaacgcgtgcctctacaaagggaccctccgtgtttcctctggctccctgtagcagaagcaccagcgaatctacagccgctctgggctgcctggtcaaggactactttcctgagcctgtgaccgtgtcctggaacagcggagcactgacatctggcgtgcacacctttccagccgtgctccaaagcagcggcctgtactctctgagcagcgtggtcacagtgcctagctctagcctgggcaccaagacctacacctgtaatgtggaccacaagcctagcaacaccaaggtggacaagcgcgtggaatctaagtacggccctcctggacctccaggacctggtaccgaagtgaaaaccgactccaccgaccacgtgaagcccaaagagacagagaacaccaagcagcccagcaagagctgccacaagcccaaggccatcgtgcacaccgagaaagtgaacatgatgagcctgaccgtgatcggcttcagaatcctgctgctgaaagtggccggctttaacctgctgatgaccctgcggctgtggtccagccgcgccaagagaagcggatctggcgtgaagcagaccctgaatttcgacctgctgaagctggctggcgacgtggaatccaacccaggcccttctagaggccatatgaccgagtacaagcccacggtgcgcctcgccacccgcgacgacgtccccagggccgtacgcaccctcgccgccgcgttcgccgactaccccgccacgcgccacaccgtcgatccggaccgccacatcgagcgggtcaccgagctgcaagaactcttcctcacgcgcgtcgggctcgacatcggcaaggtgtgggtcgcggacgacggcgccgcggtggcggtctggaccacgccggagagcgtcgaagcgggggcggtgttcgccgagatcggcccgcgcatggccgagttgagcggttcccggctggccgcgcagcaacagatggaaggcctcctggcgccgcaccggcccaaggagcccgcgtggttcctggccaccgtcggcgtctcgcccgaccaccagggcaagggtctgggcagcgccgtcgtgctccccggagtggaggcggccgagcgcgccggggtgcccgccttcctggagacctccgcgccccgcaacctccccttctacgagcggctcggcttcaccgtcaccgccgacgtcgaggtgcccgaaggaccgcgcacctggtgcatgacccgcaagcccggtgcctga

SEQ ID NO: 8934 - DNA, 2535 bp, synthetic construct
  source 1..2535: mol_type = other DNA
atggccttaccagtgaccgccttgctcctgccgctggccttgctgctccacgccgccaggccgcaggtgcagctggttgaatctggcggaggactggttcagcctggcggatctctgagactgtcttgtgccgccagcggcagcatcaacagcagatcctgcatgggctggttcagacaggcccctggcaagggaagagaaggcgtggcagctatcggacaagtgaccggcagaacctactacgtggacagcgtgaagggcagattcaccatcagcctggacaacagcaagaacaccctgtacctccagatgaacagcctgagagccgaggacaccgccgtgtactattgtgctgctgcccctggctgtctgctgtctgcacttagaagcgccgactacagaaactggggccagggcacactggtcaccgtttcttctctcgagacagtggccgccccatctgtattcatctttcctccatctgatgaacagcttaagtccggcactgcttctgttgtttgcctgcttaacaatttttacccgcgggaagccaaggtgcaatggaaagtggacaacgccctgcagtctggtaacagtcaggaaagcgtgactgaacaggacagcaaagactccacatactccttgagttccaccttgacgctcagtaaggcagactacgagaagcacaaggtttatgcctgtgaagtgactcaccagggcctctctagcccagtgactaagtccttcaaccgcggggagtgtaggaagcgacgggggtcaggcgccactaacttctctctgctgaaacaagccggggacgtggaggagaatccaggtcccactagtatggactggatttggcgcatccttttccttgtcggcgctgctaccggcgcgcattccttcgaagttcagttggtagagtctggaggcggagtggtacaaccggggcggtctcttagacttagttgcgcagcaagcggtttctctttctctggctatgggatgcactgggtgagacaggcccctgggaaaggactggagtgggtggcctacatttcatacgacgggagtaataaatactatgcagactccgttaagggcaggttcacgatctctcgggacaattccaagaatacattgtatcttcagatgaatagtctccgagctgaagacacggcggtttactactgcgctaaagacccggcctggggacttcgacttggagagagttctagctacgattttgacatttggggacaagggacaatggtcactgtctcaagtacgcgtgcctctacaaagggaccctccgtgtttcctctggctccctgtagcagaagcaccagcgaatctacagccgctctgggctgcctggtcaaggactactttcctgagcctgtgaccgtgtcctggaacagcggagcactgacatctggcgtgcacacctttccagccgtgctccaaagcagcggcctgtactctctgagcagcgtggtcacagtgcctagctctagcctgggcaccaagacctacacctgtaatgtggaccacaagcctagcaacaccaaggtggacaagcgcgtggaatctaagtacggccctccttgtcctccatgtcctggtaccgaagtgaaaaccgactccaccgaccacgtgaagcccaaagagacagagaacaccaagcagcccagcaagagctgccacaagcccaaggccatcgtgcacaccgagaaagtgaacatgatgagcctgaccgtgctgggcttcagaatcctgctgctgaaagtggccggctttaacctgctgatgaccctgcggctgtggtccagccgcgccaagagaagcggatctggcgtgaagcagaccctgaatttcgacctgctgaagctggctggcgacgtggaatccaacccaggcccttctagaggccatatgaccgagtacaagcccacggtgcgcctcgccacccgcgacgacgtccccagggccgtacgcaccctcgccgccgcgttcgccgactaccccgccacgcgccacaccgtcgatccggaccgccacatcgagcgggtcaccgagctgcaagaactcttcctcacgcgcgtcgggctcgacatcggcaaggtgtgggtcgcggacgacggcgccgcggtggcggtctggaccacgccggagagcgtcgaagcgggggcggtgttcgccgagatcggcccgcgcatggccgagttgagcggttcccggctggccgcgcagcaacagatggaaggcctcctggcgccgcaccggcccaaggagcccgcgtggttcctggccaccgtcggcgtctcgcccgaccaccagggcaagggtctgggcagcgccgtcgtgctccccggagtggaggcggccgagcgcgccggggtgcccgccttcctggagacctccgcgccccgcaacctccccttctacgagcggctcggcttcaccgtcaccgccgacgtcgaggtgcccgaaggaccgcgcacctggtgcatgacccgcaagcccggtgcctga

SEQ ID NO: 8935 - DNA, 2508 bp, synthetic construct
  source 1..2508: mol_type = other DNA
atggccttaccagtgaccgccttgctcctgccgctggccttgctgctccacgccgccaggccgcaggtgcagctggttgaatctggcggaggactggttcagcctggcggatctctgagactgtcttgtgccgccagcggcagcatcaacagcagatcctgcatgggctggttcagacaggcccctggcaagggaagagaaggcgtggcagctatcggacaagtgaccggcagaacctactacgtggacagcgtgaagggcagattcaccatcagcctggacaacagcaagaacaccctgtacctccagatgaacagcctgagagccgaggacaccgccgtgtactattgtgctgctgcccctggctgtctgctgtctgcacttagaagcgccgactacagaaactggggccagggcacactggtcaccgtttcttctctcgagacagtggccgccccatctgtattcatctttcctccatctgatgaacagcttaagtccggcactgcttctgttgtttgcctgcttaacaatttttacccgcgggaagccaaggtgcaatggaaagtggacaacgccctgcagtctggtaacagtcaggaaagcgtgactgaacaggacagcaaagactccacatactccttgagttccaccttgacgctcagtaaggcagactacgagaagcacaaggtttatgcctgtgaagtgactcaccagggcctctctagcccagtgactaagtccttcaaccgcggggagtgtaggaagcgacgggggtcaggcgccactaacttctctctgctgaaacaagccggggacgtggaggagaatccaggtcccactagtatggactggatttggcgcatccttttccttgtcggcgctgctaccggcgcgcattccttcgaagtgcaactggttgaatccggtggcggcctggtgcaagcaggcggatctctcagacttagctgtgccgcctccggcagaaccttcacaatgggatggtttaggcaggctccagggaaagagagagagttcgtcgccgccatctctctgtctcccacactggcctactacgccgactctgtgaaaggccggttcaccatctccagagataatgccaagaacaccgtggtgctgcaaatgaactctctgaaacccgaggatacagccctgtactattgtgccgctgaccggaagtccgtgatgagcatcagacccgattactggggacagggcacacaagtcacagtgtcctctacgcgtgcctctacaaagggaccctccgtgtttcctctggctccctgtagcagaagcaccagcgaatctacagccgctctgggctgcctggtcaaggactactttcctgagcctgtgaccgtgtcctggaacagcggagcactgacatctggcgtgcacacctttccagccgtgctccaaagcagcggcctgtactctctgagcagcgtggtcacagtgcctagctctagcctgggcaccaagacctacacctgtaatgtggaccacaagcctagcaacaccaaggtggacaagcgcgtggaatctaagtacggccctccttgtcctccatgtcctggtaccgaagtgaaaaccgactccaccgaccacgtgaagcccaaagagacagagaacaccaagcagcccagcaagagctgccacaagcccaaggccatcgtgcacaccgagaaagtgaacatgatgagcctgaccgtgctgggcttcagaatcctgctgctgaaagtggccggctttaacctgctgatgaccctgcggctgtggtccagccgcgccaagagaagcggatctggcgtgaagcagaccctgaatttcgacctgctgaagctggctggcgacgtggaatccaacccaggcccttctagaggccatatgaccgagtacaagcccacggtgcgcctcgccacccgcgacgacgtccccagggccgtacgcaccctcgccgccgcgttcgccgactaccccgccacgcgccacaccgtcgatccggaccgccacatcgagcgggtcaccgagctgcaagaactcttcctcacgcgcgtcgggctcgacatcggcaaggtgtgggtcgcggacgacggcgccgcggtggcggtctggaccacgccggagagcgtcgaagcgggggcggtgttcgccgagatcggcccgcgcatggccgagttgagcggttcccggctggccgcgcagcaacagatggaaggcctcctggcgccgcaccggcccaaggagcccgcgtggttcctggccaccgtcggcgtctcgcccgaccaccagggcaagggtctgggcagcgccgtcgtgctccccggagtggaggcggccgagcgcgccggggtgcccgccttcctggagacctccgcgccccgcaacctccccttctacgagcggctcggcttcaccgtcaccgccgacgtcgaggtgcccgaaggaccgcgcacctggtgcatgacccgcaagcccggtgcctga

SEQ ID NO: 8936 - DNA, 2511 bp, synthetic construct
  source 1..2511: mol_type = other DNA
atggccttaccagtgaccgccttgctcctgccgctggccttgctgctccacgccgccaggccgcaggtgcagctggttgaatctggcggaggactggttcagcctggcggatctctgagactgtcttgtgccgccagcggcagcatcaacagcagatcctgcatgggctggttcagacaggcccctggcaagggaagagaaggcgtggcagctatcggacaagtgaccggcagaacctactacgtggacagcgtgaagggcagattcaccatcagcctggacaacagcaagaacaccctgtacctccagatgaacagcctgagagccgaggacaccgccgtgtactattgtgctgctgcccctggctgtctgctgtctgcacttagaagcgccgactacagaaactggggccagggcacactggtcaccgtttcttctctcgagacagtggccgccccatctgtattcatctttcctccatctgatgaacagcttaagtccggcactgcttctgttgtttgcctgcttaacaatttttacccgcgggaagccaaggtgcaatggaaagtggacaacgccctgcagtctggtaacagtcaggaaagcgtgactgaacaggacagcaaagactccacatactccttgagttccaccttgacgctcagtaaggcagactacgagaagcacaaggtttatgcctgtgaagtgactcaccagggcctctctagcccagtgactaagtccttcaaccgcggggagtgtaggaagcgacgggggtcaggcgccactaacttctctctgctgaaacaagccggggacgtggaggagaatccaggtcccactagtatggactggatttggcgcatccttttccttgtcggcgctgctaccggcgcgcattccttcgaagtgcagctgcttgaaagtggcggcggactgattcagcctggcggatctctgagactgagctgtgccgccagcggcttcaccttttctagccacgccatgacctgggtccgacaggcacctggaaaagggcttgaatgggtgtccgccatcagcggctctggcgattacacacactacgccgacagcgtgaagggcagattcaccatcagcagagacaacagcaagaacaccgtgtacctccagatgaacagcctgagagccgaggacagcgccgtgtattattgcgccaaggatgaggatggcggcagcctgcttggacacagaggacaaggcaccctggtcaccgtttcttccacgcgtgcctctacaaagggaccctccgtgtttcctctggctccctgtagcagaagcaccagcgaatctacagccgctctgggctgcctggtcaaggactactttcctgagcctgtgaccgtgtcctggaacagcggagcactgacatctggcgtgcacacctttccagccgtgctccaaagcagcggcctgtactctctgagcagcgtggtcacagtgcctagctctagcctgggcaccaagacctacacctgtaatgtggaccacaagcctagcaacaccaaggtggacaagcgcgtggaatctaagtacggccctccttgtcctccatgtcctggtaccgaagtgaaaaccgactccaccgaccacgtgaagcccaaagagacagagaacaccaagcagcccagcaagagctgccacaagcccaaggccatcgtgcacaccgagaaagtgaacatgatgagcctgaccgtgctgggcttcagaatcctgctgctgaaagtggccggctttaacctgctgatgaccctgcggctgtggtccagccgcgccaagagaagcggatctggcgtgaagcagaccctgaatttcgacctgctgaagctggctggcgacgtggaatccaacccaggcccttctagaggccatatgaccgagtacaagcccacggtgcgcctcgccacccgcgacgacgtccccagggccgtacgcaccctcgccgccgcgttcgccgactaccccgccacgcgccacaccgtcgatccggaccgccacatcgagcgggtcaccgagctgcaagaactcttcctcacgcgcgtcgggctcgacatcggcaaggtgtgggtcgcggacgacggcgccgcggtggcggtctggaccacgccggagagcgtcgaagcgggggcggtgttcgccgagatcggcccgcgcatggccgagttgagcggttcccggctggccgcgcagcaacagatggaaggcctcctggcgccgcaccggcccaaggagcccgcgtggttcctggccaccgtcggcgtctcgcccgaccaccagggcaagggtctgggcagcgccgtcgtgctccccggagtggaggcggccgagcgcgccggggtgcccgccttcctggagacctccgcgccccgcaacctccccttctacgagcggctcggcttcaccgtcaccgccgacgtcgaggtgcccgaaggaccgcgcacctggtgcatgacccgcaagcccggtgcctga

SEQ ID NO: 8937 - DNA, 2511 bp, synthetic construct
  source 1..2511: mol_type = other DNA
atggccttaccagtgaccgccttgctcctgccgctggccttgctgctccacgccgccaggccgcaggtgcagctggttgaatctggcggaggactggttcagcctggcggatctctgagactgtcttgtgccgccagcggcagcatcaacagcagatcctgcatgggctggttcagacaggcccctggcaagggaagagaaggcgtggcagctatcggacaagtgaccggcagaacctactacgtggacagcgtgaagggcagattcaccatcagcctggacaacagcaagaacaccctgtacctccagatgaacagcctgagagccgaggacaccgccgtgtactattgtgctgctgcccctggctgtctgctgtctgcacttagaagcgccgactacagaaactggggccagggcacactggtcaccgtttcttctctcgagacagtggccgccccatctgtattcatctttcctccatctgatgaacagcttaagtccggcactgcttctgttgtttgcctgcttaacaatttttacccgcgggaagccaaggtgcaatggaaagtggacaacgccctgcagtctggtaacagtcaggaaagcgtgactgaacaggacagcaaagactccacatactccttgagttccaccttgacgctcagtaaggcagactacgagaagcacaaggtttatgcctgtgaagtgactcaccagggcctctctagcccagtgactaagtccttcaaccgcggggagtgtaggaagcgacgggggtcaggcgccactaacttctctctgctgaaacaagccggggacgtggaggagaatccaggtcccactagtatggactggatttggcgcatccttttccttgtcggcgctgctaccggcgcgcattccttcgaacaggtgcagctggttgaatctggcggaggactggttcagcctggcggatctctgagactgtcttgtgccgccagcggcttcaccttcaccaatcacgccatgagctgggtccgacaggcccctggaaaaggactggaactggtgtctagcatcagcggcaacggcagaaccacctactacgccgatagcgtgaagggcagattcaccatcagccgggacatcagcaagaacaccctggacctccagatgaacagcctgagagccgaggataccgccgtgtactactgtgccaaggatggcggagagacactggtggatagcagaggccagggcacactggtcacagtgtcatctacgcgtgcctctacaaagggaccctccgtgtttcctctggctccctgtagcagaagcaccagcgaatctacagccgctctgggctgcctggtcaaggactactttcctgagcctgtgaccgtgtcctggaacagcggagcactgacatctggcgtgcacacctttccagccgtgctccaaagcagcggcctgtactctctgagcagcgtggtcacagtgcctagctctagcctgggcaccaagacctacacctgtaatgtggaccacaagcctagcaacaccaaggtggacaagcgcgtggaatctaagtacggccctccttgtcctccatgtcctggtaccgaagtgaaaaccgactccaccgaccacgtgaagcccaaagagacagagaacaccaagcagcccagcaagagctgccacaagcccaaggccatcgtgcacaccgagaaagtgaacatgatgagcctgaccgtgctgggcttcagaatcctgctgctgaaagtggccggctttaacctgctgatgaccctgcggctgtggtccagccgcgccaagagaagcggatctggcgtgaagcagaccctgaatttcgacctgctgaagctggctggcgacgtggaatccaacccaggcccttctagaggccatatgaccgagtacaagcccacggtgcgcctcgccacccgcgacgacgtccccagggccgtacgcaccctcgccgccgcgttcgccgactaccccgccacgcgccacaccgtcgatccggaccgccacatcgagcgggtcaccgagctgcaagaactcttcctcacgcgcgtcgggctcgacatcggcaaggtgtgggtcgcggacgacggcgccgcggtggcggtctggaccacgccggagagcgtcgaagcgggggcggtgttcgccgagatcggcccgcgcatggccgagttgagcggttcccggctggccgcgcagcaacagatggaaggcctcctggcgccgcaccggcccaaggagcccgcgtggttcctggccaccgtcggcgtctcgcccgaccaccagggcaagggtctgggcagcgccgtcgtgctccccggagtggaggcggccgagcgcgccggggtgcccgccttcctggagacctccgcgccccgcaacctccccttctacgagcggctcggcttcaccgtcaccgccgacgtcgaggtgcccgaaggaccgcgcacctggtgcatgacccgcaagcccggtgcctga

SEQ ID NO: 8938 - DNA, 2508 bp, synthetic construct
  source 1..2508: mol_type = other DNA
atggccttaccagtgaccgccttgctcctgccgctggccttgctgctccacgccgccaggccgcaagttcagctggtggaaagcggtggtggcgttgtgcaacctggtagaagtctgaggcttagctgcgccgccagcttttctggatacggcgtgtcaacaatgggatggtttaggcaggctccaggcaagggccttgaaggcgtggccgctatcacagtcggctccggcaatacctactacgccgatagcgtgagaggcaggttcacaatctccagagacaacagcaagaatacggtgtacctgcaaatgaacagcctccgcgccgaggatacagccatgtattactgtgccgtgggctacctgtctggcggctcttgggatgtgcccggcagatacaattactggggacagggaaccctggttaccgtgtctagtctcgagacagtggccgccccatctgtattcatctttcctccatctgatgaacagcttaagtccggcactgcttctgttgtttgcctgcttaacaatttttacccgcgggaagccaaggtgcaatggaaagtggacaacgccctgcagtctggtaacagtcaggaaagcgtgactgaacaggacagcaaagactccacatactccttgagttccaccttgacgctcagtaaggcagactacgagaagcacaaggtttatgcctgtgaagtgactcaccagggcctctctagcccagtgactaagtccttcaaccgcggggagtgtaggaagcgacgggggtcaggcgccactaacttctctctgctgaaacaagccggggacgtggaggagaatccaggtcccactagtatggactggatttggcgcatccttttccttgtcggcgctgctaccggcgcgcattccttcgaagtgcaactggttgaatccggtggcggcctggtgcaagcaggcggatctctcagacttagctgtgccgcctccggcagaaccttcacaatgggatggtttaggcaggctccagggaaagagagagagttcgtcgccgccatctctctgtctcccacactggcctactacgccgactctgtgaaaggccggttcaccatctccagagataatgccaagaacaccgtggtgctgcaaatgaactctctgaaacccgaggatacagccctgtactattgtgccgctgaccggaagtccgtgatgagcatcagacccgattactggggacagggcacacaagtcacagtgtcctctacgcgtgcctctacaaagggaccctccgtgtttcctctggctccctgtagcagaagcaccagcgaatctacagccgctctgggctgcctggtcaaggactactttcctgagcctgtgaccgtgtcctggaacagcggagcactgacatctggcgtgcacacctttccagccgtgctccaaagcagcggcctgtactctctgagcagcgtggtcacagtgcctagctctagcctgggcaccaagacctacacctgtaatgtggaccacaagcctagcaacaccaaggtggacaagcgcgtggaatctaagtacggccctcctggacctccaggacctggtaccgaagtgaaaaccgactccaccgaccacgtgaagcccaaagagacagagaacaccaagcagcccagcaagagctgccacaagcccaaggccatcgtgcacaccgagaaagtgaacatgatgagcctgaccgtgatcggcttcagaatcctgctgctgaaagtggccggctttaacctgctgatgaccctgcggctgtggtccagccgcgccaagagaagcggatctggcgtgaagcagaccctgaatttcgacctgctgaagctggctggcgacgtggaatccaacccaggcccttctagaggccatatgaccgagtacaagcccacggtgcgcctcgccacccgcgacgacgtccccagggccgtacgcaccctcgccgccgcgttcgccgactaccccgccacgcgccacaccgtcgatccggaccgccacatcgagcgggtcaccgagctgcaagaactcttcctcacgcgcgtcgggctcgacatcggcaaggtgtgggtcgcggacgacggcgccgcggtggcggtctggaccacgccggagagcgtcgaagcgggggcggtgttcgccgagatcggcccgcgcatggccgagttgagcggttcccggctggccgcgcagcaacagatggaaggcctcctggcgccgcaccggcccaaggagcccgcgtggttcctggccaccgtcggcgtctcgcccgaccaccagggcaagggtctgggcagcgccgtcgtgctccccggagtggaggcggccgagcgcgccggggtgcccgccttcctggagacctccgcgccccgcaacctccccttctacgagcggctcggcttcaccgtcaccgccgacgtcgaggtgcccgaaggaccgcgcacctggtgcatgacccgcaagcccggtgcctga

SEQ ID NO: 8939 - DNA, 2508 bp, synthetic construct
  source 1..2508: mol_type = other DNA
atggccttaccagtgaccgccttgctcctgccgctggccttgctgctccacgccgccaggccgcaggtgcagctggttgaatctggcggaggactggttcagcctggcggatctctgagactgtcttgtgccgccagcggcagcatcaacagcagatcctgcatgggctggttcagacaggcccctggcaagggaagagaaggcgtggcagctatcggacaagtgaccggcagaacctactacgtggacagcgtgaagggcagattcaccatcagcctggacaacagcaagaacaccctgtacctccagatgaacagcctgagagccgaggacaccgccgtgtactattgtgctgctgcccctggctgtctgctgtctgcacttagaagcgccgactacagaaactggggccagggcacactggtcaccgtttcttctctcgagacagtggccgccccatctgtattcatctttcctccatctgatgaacagcttaagtccggcactgcttctgttgtttgcctgcttaacaatttttacccgcgggaagccaaggtgcaatggaaagtggacaacgccctgcagtctggtaacagtcaggaaagcgtgactgaacaggacagcaaagactccacatactccttgagttccaccttgacgctcagtaaggcagactacgagaagcacaaggtttatgcctgtgaagtgactcaccagggcctctctagcccagtgactaagtccttcaaccgcggggagtgtaggaagcgacgggggtcaggcgccactaacttctctctgctgaaacaagccggggacgtggaggagaatccaggtcccactagtatggactggatttggcgcatccttttccttgtcggcgctgctaccggcgcgcattccttcgaagtgcaactggttgaatccggtggcggcctggtgcaagcaggcggatctctcagacttagctgtgccgcctccggcagaaccttcacaatgggatggtttaggcaggctccagggaaagagagagagttcgtcgccgccatctctctgtctcccacactggcctactacgccgagtctgtgagaggccggttcaccatctccagagataatgccaagaacaccgtggtgctgcaaatgaactctctgaaacccgaggatacagccctgtactattgtgccgctgaccggaagtccgtgatgagcatcagacccgattactggggacagggcacacaagtcacagtgtcctctacgcgtgcctctacaaagggaccctccgtgtttcctctggctccctgtagcagaagcaccagcgaatctacagccgctctgggctgcctggtcaaggactactttcctgagcctgtgaccgtgtcctggaacagcggagcactgacatctggcgtgcacacctttccagccgtgctccaaagcagcggcctgtactctctgagcagcgtggtcacagtgcctagctctagcctgggcaccaagacctacacctgtaatgtggaccacaagcctagcaacaccaaggtggacaagcgcgtggaatctaagtacggccctccttgtcctccatgtcctggtaccgaagtgaaaaccgactccaccgaccacgtgaagcccaaagagacagagaacaccaagcagcccagcaagagctgccacaagcccaaggccatcgtgcacaccgagaaagtgaacatgatgagcctgaccgtgctgggcttcagaatcctgctgctgaaagtggccggctttaacctgctgatgaccctgcggctgtggtccagccgcgccaagagaagcggatctggcgtgaagcagaccctgaatttcgacctgctgaagctggctggcgacgtggaatccaacccaggcccttctagaggccatatgaccgagtacaagcccacggtgcgcctcgccacccgcgacgacgtccccagggccgtacgcaccctcgccgccgcgttcgccgactaccccgccacgcgccacaccgtcgatccggaccgccacatcgagcgggtcaccgagctgcaagaactcttcctcacgcgcgtcgggctcgacatcggcaaggtgtgggtcgcggacgacggcgccgcggtggcggtctggaccacgccggagagcgtcgaagcgggggcggtgttcgccgagatcggcccgcgcatggccgagttgagcggttcccggctggccgcgcagcaacagatggaaggcctcctggcgccgcaccggcccaaggagcccgcgtggttcctggccaccgtcggcgtctcgcccgaccaccagggcaagggtctgggcagcgccgtcgtgctccccggagtggaggcggccgagcgcgccggggtgcccgccttcctggagacctccgcgccccgcaacctccccttctacgagcggctcggcttcaccgtcaccgccgacgtcgaggtgcccgaaggaccgcgcacctggtgcatgacccgcaagcccggtgcctga

SEQ ID NO: 8940 - DNA, 1773 bp, synthetic construct
  source 1..1773: mol_type = other DNA
atggccttaccagtgaccgccttgctcctgccgctggccttgctgctccacgccgccaggccgcagatcgtgctgacacagagccctgccatcatgtccgcttctcccggcgagaaagtgaccatgacatgtagcgccagcagcagcgtgtccttcatgcactggtatcagcagaagtccggcacaagccccaagcggtggatctacgataccagcacactggcctctggcgtgccagccagatttggcggatctggcagcggcacatcttacagcctgaccatcagcagcatggaagccgaagatgccgccacctactactgccagcagtggtccagcaatcccctgacatttggagccggcaccaagctggaactgaagagactcgagacagtggccgccccatctgtattcatctttcctccatctgatgaacagcttaagtccggcactgcttctgttgtttgcctgcttaacaatttttacccgcgggaagccaaggtgcaatggaaagtggacaacgccctgcagtctggtaacagtcaggaaagcgtgactgaacaggacagcaaagactccacatactccttgagttccaccttgacgctcagtaaggcagactacgagaagcacaaggtttatgcctgtgaagtgactcaccagggcctctctagcccagtgactaagtccttcaaccgcggggagtgttctggcggagctagaagcgaagatcggtatcggaaccccaagagggccaagcgatctggatctggagcaacaaacttctcactactcaaacaagcaggtgacgtggaggagaatcccgggcctactagtatggactggatttggcgcatccttttccttgtcggcgctgctaccggcgcgcattccttcgaacaagttcagctgcaacagagcggccctgagctggttaagcctggcgcttctgtgcggatctcttgcaaggccagcggctacaccttcaccagctactacatccactgggtcaagcagcggcctggacagggactcgaatggatcggctggatctaccccggcaacctgaacaccaagtacaacgagaagttcaagggcaaagccacactgaccgccgacaagagcagcagcacagcctacatgcagctgagcagcctgacaagcgaggacagcgccgtgtacttctgcgccagatacgactggtacttcgacgtgtggggagccggaaccaccgtgacagtttcttctacgcgtgcctctacaaagggaccctccgtgtttcctctggctccctgtagcagaagcaccagcgaatctacagccgctctgggctgcctggtcaaggactactttcctgagcctgtgaccgtgtcctggaacagcggagcactgacatctggcgtgcacacctttccagccgtgctccaaagcagcggcctgtactctctgagcagcgtggtcacagtgcctagctctagcctgggcaccaagacctacacctgtaatgtggaccacaagcctagcaacaccaaggtggacaagcgcgtggaatctaagtacggccctccttgtcctccatgtcctggtaccatccccgaggacacattcttcccaagccccgagagcagctgcgacgtgaagctggtggaaaagagcttcgagacagacaccaacctgaacttccagaacctgagcgtgatcggcttcagaatcctgctgctgaaagtggccggctttaacctgctgatgaccctgcggctgtggtccagctaa

SEQ ID NO: 8941 - DNA, 2457 bp, synthetic construct
  source 1..2457: mol_type = other DNA
atggccttaccagtgaccgccttgctcctgccgctggccttgctgctccacgccgccaggccggacgtggtcatgacacagagcccttctagcctgtctgccagcgtgggcgacagagtgaccatcacctgtatggcctccgaggacatctacatccggctggcctggtatcagcagaagcctggaaacgcccctaagctgctgatctacgccgccacctctctggaaacaggcgtgccaagcagattttccggcagcggctctggcaccgatttcaccctgacaatatccagcctccagcctgaggacttcgccacctactactgccagcagtattggagcagcccctggacatttggcggaggcaccaaggtggaaatcaaactcgagacagtggccgccccatctgtattcatctttcctccatctgatgaacagcttaagtccggcactgcttctgttgtttgcctgcttaacaatttttacccgcgggaagccaaggtgcaatggaaagtggacaacgccctgcagtctggtaacagtcaggaaagcgtgactgaacaggacagcaaagactccacatactccttgagttccaccttgacgctcagtaaggcagactacgagaagcacaaggtttatgcctgtgaagtgactcaccagggcctctctagcccagtgactaagtccttcaaccgcggggagtgtaggaagcgacgggggtcaggcgccactaacttctctctgctgaaacaagccggggacgtggaggagaatccaggtcccactagtatggactggatttggcgcatccttttccttgtcggcgctgctaccggcgcgcattccttcgaacaggttcagctgcaagagtctggccccggactggtcaagcctagccaaacactgagcctgacctgtaccgtgtccggctacagcatcaccagcgactacacctggaactggatcagacagcctcctggcaacggactggaatggatcggctacatcacctacagcggcagcaccagctacaaccccagcctgaaaagccgggtgctgatctccgtggacaccagcaagaatcaggtgtccctgaagctgagcagcgtgacagccgctgataccgccgtgtactactgtgccagactggggagaagatacacaatggactactggggccagggcaccaccgtgacagtttcttctacgcgtgcctctacaaagggaccctccgtgtttcctctggctccctgtagcagaagcaccagcgaatctacagccgctctgggctgcctggtcaaggactactttcctgagcctgtgaccgtgtcctggaacagcggagcactgacatctggcgtgcacacctttccagccgtgctccaaagcagcggcctgtactctctgagcagcgtggtcacagtgcctagctctagcctgggcaccaagacctacacctgtaatgtggaccacaagcctagcaacaccaaggtggacaagcgcgtggaatctaagtacggccctccttgtcctccatgtcctggtaccgaagtgaaaaccgactccaccgaccacgtgaagcccaaagagacagagaacaccaagcagcccagcaagagctgccacaagcccaaggccatcgtgcacaccgagaaagtgaacatgatgagcctgaccgtgctgggcttcagaatcctgctgctgaaagtggccggctttaacctgctgatgaccctgcggctgtggtccagccgcgccaagagaagcggatctggcgtgaagcagaccctgaatttcgacctgctgaagctggctggcgacgtggaatccaacccaggcccttctagaggccatatgaccgagtacaagcccacggtgcgcctcgccacccgcgacgacgtccccagggccgtacgcaccctcgccgccgcgttcgccgactaccccgccacgcgccacaccgtcgatccggaccgccacatcgagcgggtcaccgagctgcaagaactcttcctcacgcgcgtcgggctcgacatcggcaaggtgtgggtcgcggacgacggcgccgcggtggcggtctggaccacgccggagagcgtcgaagcgggggcggtgttcgccgagatcggcccgcgcatggccgagttgagcggttcccggctggccgcgcagcaacagatggaaggcctcctggcgccgcaccggcccaaggagcccgcgtggttcctggccaccgtcggcgtctcgcccgaccaccagggcaagggtctgggcagcgccgtcgtgctccccggagtggaggcggccgagcgcgccggggtgcccgccttcctggagacctccgcgccccgcaacctccccttctacgagcggctcggcttcaccgtcaccgccgacgtcgaggtgcccgaaggaccgcgcacctggtgcatgacccgcaagcccggtgcctga

SEQ ID NO: 8942 - DNA, 2460 bp, synthetic construct
  source 1..2460: mol_type = other DNA
atggccttaccagtgaccgccttgctcctgccgctggccttgctgctccacgccgccaggccggacgacatccagatgacccagagcagcagcagcttcagcgtgagcctgggcgacagagtgaccatcacctgcatggccagcgaggacatctacatcagactggcctggtaccagcagaagcccggcaacgcccccagactgctgatcagcgccgccaccagcctggagaccggcgtgcccagcagattcagcggcagcggcagcggcaaggactacaccctgagcatcaccagcctgcagaccgaggacgtgggcacctactactgccagcagtactggagcagcccctggaccttcggcggcggcaccaagctggagatcaacctcgagacagtggccgccccatctgtattcatctttcctccatctgatgaacagcttaagtccggcactgcttctgttgtttgcctgcttaacaatttttacccgcgggaagccaaggtgcaatggaaagtggacaacgccctgcagtctggtaacagtcaggaaagcgtgactgaacaggacagcaaagactccacatactccttgagttccaccttgacgctcagtaaggcagactacgagaagcacaaggtttatgcctgtgaagtgactcaccagggcctctctagcccagtgactaagtccttcaaccgcggggagtgtaggaagcgacgggggtcaggcgccactaacttctctctgctgaaacaagccggggacgtggaggagaatccaggtcccactagtatggactggatttggcgcatccttttccttgtcggcgctgctaccggcgcgcattccttcgaagacgtgcagctgcaggagagcggccccggcctggtgaagcccagccagagcctgagcctgacctgcaccgtgaccggctacagcatcaccagcgactacacctggaactggatcagacagttccccggcaacaagctggagtggatgggctacatcacctacagcggcagcaccagctacaaccccagcctgaagagcagaaacagcatcaccagagacaccagcaagaaccagttcttcctgcagctgaacagcgtgaccaccgaggacaccgccacctactactgcgccagactgggcagaagatacacaatggactactggggccagggcaccagcgtgaccgtgagcagcacgcgtgcctctacaaagggaccctccgtgtttcctctggctccctgtagcagaagcaccagcgaatctacagccgctctgggctgcctggtcaaggactactttcctgagcctgtgaccgtgtcctggaacagcggagcactgacatctggcgtgcacacctttccagccgtgctccaaagcagcggcctgtactctctgagcagcgtggtcacagtgcctagctctagcctgggcaccaagacctacacctgtaatgtggaccacaagcctagcaacaccaaggtggacaagcgcgtggaatctaagtacggccctccttgtcctccatgtcctggtaccgaagtgaaaaccgactccaccgaccacgtgaagcccaaagagacagagaacaccaagcagcccagcaagagctgccacaagcccaaggccatcgtgcacaccgagaaagtgaacatgatgagcctgaccgtgctgggcttcagaatcctgctgctgaaagtggccggctttaacctgctgatgaccctgcggctgtggtccagccgcgccaagagaagcggatctggcgtgaagcagaccctgaatttcgacctgctgaagctggctggcgacgtggaatccaacccaggcccttctagaggccatatgaccgagtacaagcccacggtgcgcctcgccacccgcgacgacgtccccagggccgtacgcaccctcgccgccgcgttcgccgactaccccgccacgcgccacaccgtcgatccggaccgccacatcgagcgggtcaccgagctgcaagaactcttcctcacgcgcgtcgggctcgacatcggcaaggtgtgggtcgcggacgacggcgccgcggtggcggtctggaccacgccggagagcgtcgaagcgggggcggtgttcgccgagatcggcccgcgcatggccgagttgagcggttcccggctggccgcgcagcaacagatggaaggcctcctggcgccgcaccggcccaaggagcccgcgtggttcctggccaccgtcggcgtctcgcccgaccaccagggcaagggtctgggcagcgccgtcgtgctccccggagtggaggcggccgagcgcgccggggtgcccgccttcctggagacctccgcgccccgcaacctccccttctacgagcggctcggcttcaccgtcaccgccgacgtcgaggtgcccgaaggaccgcgcacctggtgcatgacccgcaagcccggtgcctga

SEQ ID NO: 8943 - DNA, 2496 bp, synthetic construct
  source 1..2496: mol_type = other DNA
atggccttaccagtgaccgccttgctcctgccgctggccttgctgctccacgccgccaggccgcagatcgtgctgacacagagccctgccatcatgtccgcttctcccggcgagaaagtgaccatgacatgtagcgccagcagcagcgtgtccttcatgcactggtatcagcagaagtccggcacaagccccaagcggtggatctacgataccagcacactggcctctggcgtgccagccagatttggcggatctggcagcggcacatcttacagcctgaccatcagcagcatggaagccgaagatgccgccacctactactgccagcagtggtccagcaatcccctgacatttggagccggcaccaagctggaactgaagagactcgagacagtggccgccccatctgtattcatctttcctccatctgatgaacagcttaagtccggcactgcttctgttgtttgcctgcttaacaatttttacccgcgggaagccaaggtgcaatggaaagtggacaacgccctgcagtctggtaacagtcaggaaagcgtgactgaacaggacagcaaagactccacatactccttgagttccaccttgacgctcagtaaggcagactacgagaagcacaaggtttatgcctgtgaagtgactcaccagggcctctctagcccagtgactaagtccttcaaccgcggggagtgttctggcggagctagaagcgaagatcggtatcggaaccccaagagggccaagcgatctggatctggagcaacaaacttctcactactcaaacaagcaggtgacgtggaggagaatcccgggcctactagtatggactggatttggcgcatccttttccttgtcggcgctgctaccggcgcgcattccttcgaacaagttcagctgcaacagagcggccctgagctggttaagcctggcgcttctgtgcggatctcttgcaaggccagcggctacaccttcaccagctactacatccactgggtcaagcagcggcctggacagggactcgaatggatcggctggatctaccccggcaacctgaacaccaagtacaacgagaagttcaagggcaaagccacactgaccgccgacaagagcagcagcacagcctacatgcagctgagcagcctgacaagcgaggacagcgccgtgtacttctgcgccagatacgactggtacttcgacgtgtggggagccggaaccaccgtgacagtttcttctacgcgtgcctctacaaagggaccctccgtgtttcctctggctccctgtagcagaagcaccagcgaatctacagccgctctgggctgcctggtcaaggactactttcctgagcctgtgaccgtgtcctggaacagcggagcactgacatctggcgtgcacacctttccagccgtgctccaaagcagcggcctgtactctctgagcagcgtggtcacagtgcctagctctagcctgggcaccaagacctacacctgtaatgtggaccacaagcctagcaacaccaaggtggacaagcgcgtggaatctaagtacggccctcctggacctccaggacctggtaccgaagtgaaaaccgactccaccgaccacgtgaagcccaaagagacagagaacaccaagcagcccagcaagagctgccacaagcccaaggccatcgtgcacaccgagaaagtgaacatgatgagcctgaccgtgatcggcttcagaatcctgctgctgaaagtggccggctttaacctgctgatgaccctgcggctgtggtccagccgcgccaagagaagcggatctggcgtgaagcagaccctgaatttcgacctgctgaagctggctggcgacgtggaatccaacccaggcccttctagaggccatatgaccgagtacaagcccacggtgcgcctcgccacccgcgacgacgtccccagggccgtacgcaccctcgccgccgcgttcgccgactaccccgccacgcgccacaccgtcgatccggaccgccacatcgagcgggtcaccgagctgcaagaactcttcctcacgcgcgtcgggctcgacatcggcaaggtgtgggtcgcggacgacggcgccgcggtggcggtctggaccacgccggagagcgtcgaagcgggggcggtgttcgccgagatcggcccgcgcatggccgagttgagcggttcccggctggccgcgcagcaacagatggaaggcctcctggcgccgcaccggcccaaggagcccgcgtggttcctggccaccgtcggcgtctcgcccgaccaccagggcaagggtctgggcagcgccgtcgtgctccccggagtggaggcggccgagcgcgccggggtgcccgccttcctggagacctccgcgccccgcaacctccccttctacgagcggctcggcttcaccgtcaccgccgacgtcgaggtgcccgaaggaccgcgcacctggtgcatgacccgcaagcccggtgcctga

SEQ ID NO: 8944 - DNA, 2457 bp, synthetic construct
  source 1..2457: mol_type = other DNA
atggccttaccagtgaccgccttgctcctgccgctggccttgctgctccacgccgccaggccggacgtggtcatgacacagagcccttctagcctgtctgccagcgtgggcgacagagtgaccatcacctgtatggcctccgaggacatctacatccggctggcctggtatcagcagaagcctggaaacgcccctaagctgctgatctacgccgccacctctctggaaacaggcgtgccaagcagattttccggcagcggctctggcaccgatttcaccctgacaatatccagcctccagcctgaggacttcgccacctactactgccagcagtattggagcagcccctggacatttggcggaggcaccaaggtggaaatcaaactcgagacagtggccgccccatctgtattcatctttcctccatctgatgaacagcttaagtccggcactgcttctgttgtttgcctgcttaacaatttttacccgcgggaagccaaggtgcaatggaaagtggacaacgccctgcagtctggtaacagtcaggaaagcgtgactgaacaggacagcaaagactccacatactccttgagttccaccttgacgctcagtaaggcagactacgagaagcacaaggtttatgcctgtgaagtgactcaccagggcctctctagcccagtgactaagtccttcaaccgcggggagtgtaggaagcgacgggggtcaggcgccactaacttctctctgctgaaacaagccggggacgtggaggagaatccaggtcccactagtatggactggatttggcgcatccttttccttgtcggcgctgctaccggcgcgcattccttcgaacaggttcagctgcaagagtctggccccggactggtcaagcctagccaaacactgagcctgacctgtaccgtgtccggctacagcatcaccagcgactacacctggaactggatcagacagcctcctggcaacggactggaatggatcggctacatcacctacagcggcagcaccagctacaaccccagcctgaaaagccgggtgctgatctccgtggacaccagcaagaatcaggtgtccctgaagctgagcagcgtgacagccgctgataccgccgtgtactactgtgccagactggggagaagatacacaatggactactggggccagggcaccaccgtgacagtttcttctacgcgtgcctctacaaagggaccctccgtgtttcctctggctccctgtagcagaagcaccagcgaatctacagccgctctgggctgcctggtcaaggactactttcctgagcctgtgaccgtgtcctggaacagcggagcactgacatctggcgtgcacacctttccagccgtgctccaaagcagcggcctgtactctctgagcagcgtggtcacagtgcctagctctagcctgggcaccaagacctacacctgtaatgtggaccacaagcctagcaacaccaaggtggacaagcgcgtggaatctaagtacggccctcctggacctccaggacctggtaccgaagtgaaaaccgactccaccgaccacgtgaagcccaaagagacagagaacaccaagcagcccagcaagagctgccacaagcccaaggccatcgtgcacaccgagaaagtgaacatgatgagcctgaccgtgatcggcttcagaatcctgctgctgaaagtggccggctttaacctgctgatgaccctgcggctgtggtccagccgcgccaagagaagcggatctggcgtgaagcagaccctgaatttcgacctgctgaagctggctggcgacgtggaatccaacccaggcccttctagaggccatatgaccgagtacaagcccacggtgcgcctcgccacccgcgacgacgtccccagggccgtacgcaccctcgccgccgcgttcgccgactaccccgccacgcgccacaccgtcgatccggaccgccacatcgagcgggtcaccgagctgcaagaactcttcctcacgcgcgtcgggctcgacatcggcaaggtgtgggtcgcggacgacggcgccgcggtggcggtctggaccacgccggagagcgtcgaagcgggggcggtgttcgccgagatcggcccgcgcatggccgagttgagcggttcccggctggccgcgcagcaacagatggaaggcctcctggcgccgcaccggcccaaggagcccgcgtggttcctggccaccgtcggcgtctcgcccgaccaccagggcaagggtctgggcagcgccgtcgtgctccccggagtggaggcggccgagcgcgccggggtgcccgccttcctggagacctccgcgccccgcaacctccccttctacgagcggctcggcttcaccgtcaccgccgacgtcgaggtgcccgaaggaccgcgcacctggtgcatgacccgcaagcccggtgcctga

SEQ ID NO: 8945 - DNA, 2460 bp, synthetic construct
  source 1..2460: mol_type = other DNA
atggccttaccagtgaccgccttgctcctgccgctggccttgctgctccacgccgccaggccggacgacatccagatgacccagagcagcagcagcttcagcgtgagcctgggcgacagagtgaccatcacctgcatggccagcgaggacatctacatcagactggcctggtaccagcagaagcccggcaacgcccccagactgctgatcagcgccgccaccagcctggagaccggcgtgcccagcagattcagcggcagcggcagcggcaaggactacaccctgagcatcaccagcctgcagaccgaggacgtgggcacctactactgccagcagtactggagcagcccctggaccttcggcggcggcaccaagctggagatcaacctcgagacagtggccgccccatctgtattcatctttcctccatctgatgaacagcttaagtccggcactgcttctgttgtttgcctgcttaacaatttttacccgcgggaagccaaggtgcaatggaaagtggacaacgccctgcagtctggtaacagtcaggaaagcgtgactgaacaggacagcaaagactccacatactccttgagttccaccttgacgctcagtaaggcagactacgagaagcacaaggtttatgcctgtgaagtgactcaccagggcctctctagcccagtgactaagtccttcaaccgcggggagtgtaggaagcgacgggggtcaggcgccactaacttctctctgctgaaacaagccggggacgtggaggagaatccaggtcccactagtatggactggatttggcgcatccttttccttgtcggcgctgctaccggcgcgcattccttcgaagacgtgcagctgcaggagagcggccccggcctggtgaagcccagccagagcctgagcctgacctgcaccgtgaccggctacagcatcaccagcgactacacctggaactggatcagacagttccccggcaacaagctggagtggatgggctacatcacctacagcggcagcaccagctacaaccccagcctgaagagcagaaacagcatcaccagagacaccagcaagaaccagttcttcctgcagctgaacagcgtgaccaccgaggacaccgccacctactactgcgccagactgggcagaagatacacaatggactactggggccagggcaccagcgtgaccgtgagcagcacgcgtgcctctacaaagggaccctccgtgtttcctctggctccctgtagcagaagcaccagcgaatctacagccgctctgggctgcctggtcaaggactactttcctgagcctgtgaccgtgtcctggaacagcggagcactgacatctggcgtgcacacctttccagccgtgctccaaagcagcggcctgtactctctgagcagcgtggtcacagtgcctagctctagcctgggcaccaagacctacacctgtaatgtggaccacaagcctagcaacaccaaggtggacaagcgcgtggaatctaagtacggccctcctggacctccaggacctggtaccgaagtgaaaaccgactccaccgaccacgtgaagcccaaagagacagagaacaccaagcagcccagcaagagctgccacaagcccaaggccatcgtgcacaccgagaaagtgaacatgatgagcctgaccgtgatcggcttcagaatcctgctgctgaaagtggccggctttaacctgctgatgaccctgcggctgtggtccagccgcgccaagagaagcggatctggcgtgaagcagaccctgaatttcgacctgctgaagctggctggcgacgtggaatccaacccaggcccttctagaggccatatgaccgagtacaagcccacggtgcgcctcgccacccgcgacgacgtccccagggccgtacgcaccctcgccgccgcgttcgccgactaccccgccacgcgccacaccgtcgatccggaccgccacatcgagcgggtcaccgagctgcaagaactcttcctcacgcgcgtcgggctcgacatcggcaaggtgtgggtcgcggacgacggcgccgcggtggcggtctggaccacgccggagagcgtcgaagcgggggcggtgttcgccgagatcggcccgcgcatggccgagttgagcggttcccggctggccgcgcagcaacagatggaaggcctcctggcgccgcaccggcccaaggagcccgcgtggttcctggccaccgtcggcgtctcgcccgaccaccagggcaagggtctgggcagcgccgtcgtgctccccggagtggaggcggccgagcgcgccggggtgcccgccttcctggagacctccgcgccccgcaacctccccttctacgagcggctcggcttcaccgtcaccgccgacgtcgaggtgcccgaaggaccgcgcacctggtgcatgacccgcaagcccggtgcctga

SEQ ID NO: 8946 - DNA, 2532 bp, synthetic construct
  source 1..2532: mol_type = other DNA
atggccttaccagtgaccgccttgctcctgccgctggccttgctgctccacgccgccaggccgcaggtgcagctggttgaatctggcggaggactggttcagcctggcggatctctgagactgtcttgtgccgccagcggcagcatcaacagcagatcctgcatgggctggttcagacaggcccctggcaagggaagagaaggcgtggcagctatcggacaagtgaccggcagaacctactacgtggacagcgtgaagggcagattcaccatcagcctggacaacagcaagaacaccctgtacctccagatgaacagcctgagagccgaggacaccgccgtgtactattgtgctgctgcccctggctgtctgctgtctgcacttagaagcgccgactacagaaactggggccagggcacactggtcaccgtttcttctctcgagacagtggccgccccatctgtattcatctttcctccatctgatgaacagcttaagtccggcactgcttctgttgtttgcctgcttaacaatttttacccgcgggaagccaaggtgcaatggaaagtggacaacgccctgcagtctggtaacagtcaggaaagcgtgactgaacaggacagcaaagactccacatactccttgagttccaccttgacgctcagtaaggcagactacgagaagcacaaggtttatgcctgtgaagtgactcaccagggcctctctagcccagtgactaagtccttcaaccgcggggagtgtaggaagcgacgggggtcaggcgccactaacttctctctgctgaaacaagccggggacgtggaggagaatccaggtcccactagtatggactggatttggcgcatccttttccttgtcggcgctgctaccggcgcgcattccttcgaacaggtgcagctggttgaatctggcggaggatctgttcaggctggcggctctctgagactgtcttgtggcgcttccggcaacatcagcagcagaaactgcatgggctggttcagacaggcccctggcaaagagagagaaggcattgccgccatcggacaagtgaccggcagaacctactacgtggacagcgtgaagggcagattcaccatcagcctggacaacgccaagaacaccctgtacctccagatgaacacactgaagcccgaggacaccgccatgtactactgtgctgctgcccctggctgtctgctgtctgcacttagaagcgccgactacagaaactggggccagggaacccaagtgacagtgtctagtacgcgtgcctctacaaagggaccctccgtgtttcctctggctccctgtagcagaagcaccagcgaatctacagccgctctgggctgcctggtcaaggactactttcctgagcctgtgaccgtgtcctggaacagcggagcactgacatctggcgtgcacacctttccagccgtgctccaaagcagcggcctgtactctctgagcagcgtggtcacagtgcctagctctagcctgggcaccaagacctacacctgtaatgtggaccacaagcctagcaacaccaaggtggacaagcgcgtggaatctaagtacggccctccttgtcctccatgtcctggtaccgaagtgaaaaccgactccaccgaccacgtgaagcccaaagagacagagaacaccaagcagcccagcaagagctgccacaagcccaaggccatcgtgcacaccgagaaagtgaacatgatgagcctgaccgtgctgggcttcagaatcctgctgctgaaagtggccggctttaacctgctgatgaccctgcggctgtggtccagccgcgccaagagaagcggatctggcgtgaagcagaccctgaatttcgacctgctgaagctggctggcgacgtggaatccaacccaggcccttctagaggccatatgaccgagtacaagcccacggtgcgcctcgccacccgcgacgacgtccccagggccgtacgcaccctcgccgccgcgttcgccgactaccccgccacgcgccacaccgtcgatccggaccgccacatcgagcgggtcaccgagctgcaagaactcttcctcacgcgcgtcgggctcgacatcggcaaggtgtgggtcgcggacgacggcgccgcggtggcggtctggaccacgccggagagcgtcgaagcgggggcggtgttcgccgagatcggcccgcgcatggccgagttgagcggttcccggctggccgcgcagcaacagatggaaggcctcctggcgccgcaccggcccaaggagcccgcgtggttcctggccaccgtcggcgtctcgcccgaccaccagggcaagggtctgggcagcgccgtcgtgctccccggagtggaggcggccgagcgcgccggggtgcccgccttcctggagacctccgcgccccgcaacctccccttctacgagcggctcggcttcaccgtcaccgccgacgtcgaggtgcccgaaggaccgcgcacctggtgcatgacccgcaagcccggtgcctga

SEQ ID NO: 8947 - DNA, 2508 bp, synthetic construct
  source 1..2508: mol_type = other DNA
atggccttaccagtgaccgccttgctcctgccgctggccttgctgctccacgccgccaggccgcaggtgcagctggttgaatctggcggaggactggttcagcctggcggatctctgagactgtcttgtgccgccagcggcagcatcaacagcagatcctgcatgggctggttcagacaggcccctggcaagggaagagaaggcgtggcagctatcggacaagtgaccggcagaacctactacgtggacagcgtgaagggcagattcaccatcagcctggacaacagcaagaacaccctgtacctccagatgaacagcctgagagccgaggacaccgccgtgtactattgtgctgctgcccctggctgtctgctgtctgcacttagaagcgccgactacagaaactggggccagggcacactggtcaccgtttcttctctcgagacagtggccgccccatctgtattcatctttcctccatctgatgaacagcttaagtccggcactgcttctgttgtttgcctgcttaacaatttttacccgcgggaagccaaggtgcaatggaaagtggacaacgccctgcagtctggtaacagtcaggaaagcgtgactgaacaggacagcaaagactccacatactccttgagttccaccttgacgctcagtaaggcagactacgagaagcacaaggtttatgcctgtgaagtgactcaccagggcctctctagcccagtgactaagtccttcaaccgcggggagtgtaggaagcgacgggggtcaggcgccactaacttctctctgctgaaacaagccggggacgtggaggagaatccaggtcccactagtatggactggatttggcgcatccttttccttgtcggcgctgctaccggcgcgcattccttcgaagtgcaactggttgaatccggtggcggcctggtgcaagcaggcggatctctcagacttagctgtgccgcctccggcagaaccttcacaatgggatggtttaggcaggctccagggaaagagagagagttcgtcgccgccatctctctgtctcccacactggcctactacgccgagtctgtgagaggccggttcaccatctccagagataatgccaagaacaccgtggtgctgcaaatgaactctctgagagccgaggatacagccgtgtactattgtgccgctgaccggaagtccgtgatgagcatcagacccgattactggggacagggcacacaagtcacagtgtcctctacgcgtgcctctacaaagggaccctccgtgtttcctctggctccctgtagcagaagcaccagcgaatctacagccgctctgggctgcctggtcaaggactactttcctgagcctgtgaccgtgtcctggaacagcggagcactgacatctggcgtgcacacctttccagccgtgctccaaagcagcggcctgtactctctgagcagcgtggtcacagtgcctagctctagcctgggcaccaagacctacacctgtaatgtggaccacaagcctagcaacaccaaggtggacaagcgcgtggaatctaagtacggccctccttgtcctccatgtcctggtaccgaagtgaaaaccgactccaccgaccacgtgaagcccaaagagacagagaacaccaagcagcccagcaagagctgccacaagcccaaggccatcgtgcacaccgagaaagtgaacatgatgagcctgaccgtgctgggcttcagaatcctgctgctgaaagtggccggctttaacctgctgatgaccctgcggctgtggtccagccgcgccaagagaagcggatctggcgtgaagcagaccctgaatttcgacctgctgaagctggctggcgacgtggaatccaacccaggcccttctagaggccatatgaccgagtacaagcccacggtgcgcctcgccacccgcgacgacgtccccagggccgtacgcaccctcgccgccgcgttcgccgactaccccgccacgcgccacaccgtcgatccggaccgccacatcgagcgggtcaccgagctgcaagaactcttcctcacgcgcgtcgggctcgacatcggcaaggtgtgggtcgcggacgacggcgccgcggtggcggtctggaccacgccggagagcgtcgaagcgggggcggtgttcgccgagatcggcccgcgcatggccgagttgagcggttcccggctggccgcgcagcaacagatggaaggcctcctggcgccgcaccggcccaaggagcccgcgtggttcctggccaccgtcggcgtctcgcccgaccaccagggcaagggtctgggcagcgccgtcgtgctccccggagtggaggcggccgagcgcgccggggtgcccgccttcctggagacctccgcgccccgcaacctccccttctacgagcggctcggcttcaccgtcaccgccgacgtcgaggtgcccgaaggaccgcgcacctggtgcatgacccgcaagcccggtgcctga

SEQ ID NO: 8948 - DNA, 2532 bp, synthetic construct
  source 1..2532: mol_type = other DNA
atggccttaccagtgaccgccttgctcctgccgctggccttgctgctccacgccgccaggccgcaagttcagctggtggaaagcggtggtggcgttgtgcaacctggtagaagtctgaggcttagctgcgccgccagcttttctggatacggcgtgtcaacaatgggatggtttaggcaggctccaggcaagggccttgaaggcgtggccgctatcacagtcggctccggcaatacctactacgccgatagcgtgagaggcaggttcacaatctccagagacaacagcaagaatacggtgtacctgcaaatgaacagcctccgcgccgaggatacagccatgtattactgtgccgtgggctacctgtctggcggctcttgggatgtgcccggcagatacaattactggggacagggaaccctggttaccgtgtctagtctcgagacagtggccgccccatctgtattcatctttcctccatctgatgaacagcttaagtccggcactgcttctgttgtttgcctgcttaacaatttttacccgcgggaagccaaggtgcaatggaaagtggacaacgccctgcagtctggtaacagtcaggaaagcgtgactgaacaggacagcaaagactccacatactccttgagttccaccttgacgctcagtaaggcagactacgagaagcacaaggtttatgcctgtgaagtgactcaccagggcctctctagcccagtgactaagtccttcaaccgcggggagtgtaggaagcgacgggggtcaggcgccactaacttctctctgctgaaacaagccggggacgtggaggagaatccaggtcccactagtatggactggatttggcgcatccttttccttgtcggcgctgctaccggcgcgcattccttcgaacaggtgcagctggttgaatctggtggcggagttgttcagcctggcggctctctgagactgtcttgtgccgccagctttagcggctacggcgtgtcaacaatggcctggtttagacaggcccctggcaaaggactggaaggcgtggccgtgatcacagtcggcagcggcaatacctactacaccgactctgtgagaggcagattcaccatcagccgggacaacagcaagaacaccgtgtacctccagatgaacagcctgagagccgaggacaccgccatgtactattgtgccgttggctggctgagcggcggatcttggcatgtgcctggcagatacaactactggggccagggcacactggtcacagtttctagcacgcgtgcctctacaaagggaccctccgtgtttcctctggctccctgtagcagaagcaccagcgaatctacagccgctctgggctgcctggtcaaggactactttcctgagcctgtgaccgtgtcctggaacagcggagcactgacatctggcgtgcacacctttccagccgtgctccaaagcagcggcctgtactctctgagcagcgtggtcacagtgcctagctctagcctgggcaccaagacctacacctgtaatgtggaccacaagcctagcaacaccaaggtggacaagcgcgtggaatctaagtacggccctccttgtcctccatgtcctggtaccgaagtgaaaaccgactccaccgaccacgtgaagcccaaagagacagagaacaccaagcagcccagcaagagctgccacaagcccaaggccatcgtgcacaccgagaaagtgaacatgatgagcctgaccgtgctgggcttcagaatcctgctgctgaaagtggccggctttaacctgctgatgaccctgcggctgtggtccagccgcgccaagagaagcggatctggcgtgaagcagaccctgaatttcgacctgctgaagctggctggcgacgtggaatccaacccaggcccttctagaggccatatgaccgagtacaagcccacggtgcgcctcgccacccgcgacgacgtccccagggccgtacgcaccctcgccgccgcgttcgccgactaccccgccacgcgccacaccgtcgatccggaccgccacatcgagcgggtcaccgagctgcaagaactcttcctcacgcgcgtcgggctcgacatcggcaaggtgtgggtcgcggacgacggcgccgcggtggcggtctggaccacgccggagagcgtcgaagcgggggcggtgttcgccgagatcggcccgcgcatggccgagttgagcggttcccggctggccgcgcagcaacagatggaaggcctcctggcgccgcaccggcccaaggagcccgcgtggttcctggccaccgtcggcgtctcgcccgaccaccagggcaagggtctgggcagcgccgtcgtgctccccggagtggaggcggccgagcgcgccggggtgcccgccttcctggagacctccgcgccccgcaacctccccttctacgagcggctcggcttcaccgtcaccgccgacgtcgaggtgcccgaaggaccgcgcacctggtgcatgacccgcaagcccggtgcctga

SEQ ID NO: 8949 - DNA, 2532 bp, synthetic construct
  source 1..2532: mol_type = other DNA
atggccttaccagtgaccgccttgctcctgccgctggccttgctgctccacgccgccaggccgcaagttcagctggtggaaagcggtggtggcgttgtgcaacctggtagaagtctgaggcttagctgcgccgccagcttttctggatacggcgtgtcaacaatgggatggtttaggcaggctccaggcaagggccttgaaggcgtggccgtgatcacagtcggctccggcaatacctactacgccgatagcgtgagaggcaggttcacaatctccagagacaacagcaagaatacggtgtacctgcaaatgaacagcctccgcgccgaggatacagccatgtattactgtgccgtgggctacctgtctggcggctcttgggatgtgcccggcagatacaattactggggacagggaaccctggttaccgtgtctagtctcgagacagtggccgccccatctgtattcatctttcctccatctgatgaacagcttaagtccggcactgcttctgttgtttgcctgcttaacaatttttacccgcgggaagccaaggtgcaatggaaagtggacaacgccctgcagtctggtaacagtcaggaaagcgtgactgaacaggacagcaaagactccacatactccttgagttccaccttgacgctcagtaaggcagactacgagaagcacaaggtttatgcctgtgaagtgactcaccagggcctctctagcccagtgactaagtccttcaaccgcggggagtgtaggaagcgacgggggtcaggcgccactaacttctctctgctgaaacaagccggggacgtggaggagaatccaggtcccactagtatggactggatttggcgcatccttttccttgtcggcgctgctaccggcgcgcattccttcgaacaggtgcagctggttgaatctggtggcggagttgttcagcctggcggctctctgagactgtcttgtgccgccagctttagcggctacggcgtgtcaacaatggcctggtttagacaggcccctggcaaaggactggaaggcgtggccgtgatcacagtcggcagcggcaatacctactacaccgactctgtgagaggcagattcaccatcagccgggacaacagcaagaacaccgtgtacctccagatgaacagcctgagagccgaggacaccgccatgtactattgtgccgttggctggctgagcggcggatcttggcatgtgcctggcagatacaactactggggccagggcacactggtcacagtttctagcacgcgtgcctctacaaagggaccctccgtgtttcctctggctccctgtagcagaagcaccagcgaatctacagccgctctgggctgcctggtcaaggactactttcctgagcctgtgaccgtgtcctggaacagcggagcactgacatctggcgtgcacacctttccagccgtgctccaaagcagcggcctgtactctctgagcagcgtggtcacagtgcctagctctagcctgggcaccaagacctacacctgtaatgtggaccacaagcctagcaacaccaaggtggacaagcgcgtggaatctaagtacggccctccttgtcctccatgtcctggtaccgaagtgaaaaccgactccaccgaccacgtgaagcccaaagagacagagaacaccaagcagcccagcaagagctgccacaagcccaaggccatcgtgcacaccgagaaagtgaacatgatgagcctgaccgtgctgggcttcagaatcctgctgctgaaagtggccggctttaacctgctgatgaccctgcggctgtggtccagccgcgccaagagaagcggatctggcgtgaagcagaccctgaatttcgacctgctgaagctggctggcgacgtggaatccaacccaggcccttctagaggccatatgaccgagtacaagcccacggtgcgcctcgccacccgcgacgacgtccccagggccgtacgcaccctcgccgccgcgttcgccgactaccccgccacgcgccacaccgtcgatccggaccgccacatcgagcgggtcaccgagctgcaagaactcttcctcacgcgcgtcgggctcgacatcggcaaggtgtgggtcgcggacgacggcgccgcggtggcggtctggaccacgccggagagcgtcgaagcgggggcggtgttcgccgagatcggcccgcgcatggccgagttgagcggttcccggctggccgcgcagcaacagatggaaggcctcctggcgccgcaccggcccaaggagcccgcgtggttcctggccaccgtcggcgtctcgcccgaccaccagggcaagggtctgggcagcgccgtcgtgctccccggagtggaggcggccgagcgcgccggggtgcccgccttcctggagacctccgcgccccgcaacctccccttctacgagcggctcggcttcaccgtcaccgccgacgtcgaggtgcccgaaggaccgcgcacctggtgcatgacccgcaagcccggtgcctga

SEQ ID NO: 8950 - DNA, 2532 bp, synthetic construct
  source 1..2532: mol_type = other DNA
atggccttaccagtgaccgccttgctcctgccgctggccttgctgctccacgccgccaggccgcaagttcagctggtggaaagcggtggtggcgttgtgcaacctggtagaagtctgaggcttagctgcgccgccagcttttctggatacggcgtgtcaacaatgggatggtttaggcaggctccaggcaagggccttgaaggcgtggccgtgatcacagtcggctccggcaatacctactacaccgatagcgtgagaggcaggttcacaatctccagagacaacagcaagaatacggtgtacctgcaaatgaacagcctccgcgccgaggatacagccatgtattactgtgccgtgggctacctgtctggcggctcttgggatgtgcccggcagatacaattactggggacagggaaccctggttaccgtgtctagtctcgagacagtggccgccccatctgtattcatctttcctccatctgatgaacagcttaagtccggcactgcttctgttgtttgcctgcttaacaatttttacccgcgggaagccaaggtgcaatggaaagtggacaacgccctgcagtctggtaacagtcaggaaagcgtgactgaacaggacagcaaagactccacatactccttgagttccaccttgacgctcagtaaggcagactacgagaagcacaaggtttatgcctgtgaagtgactcaccagggcctctctagcccagtgactaagtccttcaaccgcggggagtgtaggaagcgacgggggtcaggcgccactaacttctctctgctgaaacaagccggggacgtggaggagaatccaggtcccactagtatggactggatttggcgcatccttttccttgtcggcgctgctaccggcgcgcattccttcgaacaggtgcagctggttgaatctggtggcggagttgttcagcctggcggctctctgagactgtcttgtgccgccagctttagcggctacggcgtgtcaacaatggcctggtttagacaggcccctggcaaaggactggaaggcgtggccgtgatcacagtcggcagcggcaatacctactacaccgactctgtgagaggcagattcaccatcagccgggacaacagcaagaacaccgtgtacctccagatgaacagcctgagagccgaggacaccgccatgtactattgtgccgttggctggctgagcggcggatcttggcatgtgcctggcagatacaactactggggccagggcacactggtcacagtttctagcacgcgtgcctctacaaagggaccctccgtgtttcctctggctccctgtagcagaagcaccagcgaatctacagccgctctgggctgcctggtcaaggactactttcctgagcctgtgaccgtgtcctggaacagcggagcactgacatctggcgtgcacacctttccagccgtgctccaaagcagcggcctgtactctctgagcagcgtggtcacagtgcctagctctagcctgggcaccaagacctacacctgtaatgtggaccacaagcctagcaacaccaaggtggacaagcgcgtggaatctaagtacggccctccttgtcctccatgtcctggtaccgaagtgaaaaccgactccaccgaccacgtgaagcccaaagagacagagaacaccaagcagcccagcaagagctgccacaagcccaaggccatcgtgcacaccgagaaagtgaacatgatgagcctgaccgtgctgggcttcagaatcctgctgctgaaagtggccggctttaacctgctgatgaccctgcggctgtggtccagccgcgccaagagaagcggatctggcgtgaagcagaccctgaatttcgacctgctgaagctggctggcgacgtggaatccaacccaggcccttctagaggccatatgaccgagtacaagcccacggtgcgcctcgccacccgcgacgacgtccccagggccgtacgcaccctcgccgccgcgttcgccgactaccccgccacgcgccacaccgtcgatccggaccgccacatcgagcgggtcaccgagctgcaagaactcttcctcacgcgcgtcgggctcgacatcggcaaggtgtgggtcgcggacgacggcgccgcggtggcggtctggaccacgccggagagcgtcgaagcgggggcggtgttcgccgagatcggcccgcgcatggccgagttgagcggttcccggctggccgcgcagcaacagatggaaggcctcctggcgccgcaccggcccaaggagcccgcgtggttcctggccaccgtcggcgtctcgcccgaccaccagggcaagggtctgggcagcgccgtcgtgctccccggagtggaggcggccgagcgcgccggggtgcccgccttcctggagacctccgcgccccgcaacctccccttctacgagcggctcggcttcaccgtcaccgccgacgtcgaggtgcccgaaggaccgcgcacctggtgcatgacccgcaagcccggtgcctga

SEQ ID NO: 8951 - DNA, 2763 bp, synthetic construct
  source 1..2763: mol_type = other DNA
atggccttaccagtgaccgccttgctcctgccgctggccttgctgctccacgccgccaggccggacatccagttgacccagtcccccagctcactcagcgccagtgtgggggaccgggtgaccattacctgtaaagccagtcagagtgtggactatgacggggatagcttcctgaattggtatcagcagaagcctggcaaagccccaaagctgctgatctacgctgcatctaatctggagtcaggcgtgccttccaggttctccggtagtgggtctgggaccgatttcacattgaccatttcatccctccaacccgaggatttcgctacatattactgtcagcagtccaatgaggaccctctcacctttggccagggcaccaaagttgaaattaagagactcgagacagtggccgccccatctgtattcatctttcctccatctgatgaacagcttaagtccggcactgcttctgttgtttgcctgcttaacaatttttacccgcgggaagccaaggtgcaatggaaagtggacaacgccctgcagtctggtaacagtcaggaaagcgtgactgaacaggacagcaaagactccacatactccttgagttccaccttgacgctcagtaaggcagactacgagaagcacaaggtttatgcctgtgaagtgactcaccagggcctctctagcccagtgactaagtccttcaaccgcggggagtgtaggaagcgacgggggtcaggcgccactaacttctctctgctgaaacaagccggggacgtggaggagaatccaggtcccactagtatggactggatttggcgcatccttttccttgtcggcgctgctaccggcgcgcattccttcgaagaagtccaacttgtggagtctggagggggcctggtgcagcccggcggctctctcagactgtcttgtgcggcaagcggctacaccttcacctcttactggatagaatgggtgaggcaggcacctggaaagggactggagtggattggagagattctgccaggagggggagatacaaattacaatgaaatcttcaaggggcgggccaccttttcagcggataccagcaagaatacagcttacctgcagatgaatagcctccgggcagaagataccgctgtttattattgcacgagacgggtgccaataagactggactattgggggcaagggactcttgtcaccgtcagttcaacgcgtgcctctacaaagggaccctccgtgtttcctctggctccctgtagcagaagcaccagcgaatctacagccgctctgggctgcctggtcaaggactactttcctgagcctgtgaccgtgtcctggaacagcggagcactgacatctggcgtgcacacctttccagccgtgctccaaagcagcggcctgtactctctgagcagcgtggtcacagtgcctagctctagcctgggcaccaagacctacacctgtaatgtggaccacaagcctagcaacaccaaggtggacaagcgcgtggaatctaagtacggccctccttgtcctccatgtcctggtaccatccccgaggacacattcttcccaagccccgagagcagctgcgacgtgaagctggtggaaaagagcttcgagacagacaccaacctgaacttccagaacctgagcgtgatcggcttcagaatcctgctgctgaaagtggccggctttaacctgctgatgaccctgcggctgtggtccagccgcgccaagagaagcggatctggcgtgaagcagaccctgaatttcgacctgctgaagctggctggcgacgtggaatccaacccaggcccttctagcaccatggccctgcctgtgacagctctgctgctgcctctggcactgctgctgcacgccgccagacctttcgaggtgcagctggtggaatctggcggcggacttgttcaacctggcggctctctgagactgagctgtgccgcttctggctacaccttcagcagctactggatcgagtgggtccgacaggcccctggcaaaggactggaatggatcggagagatccttcctggcggaggcgacaccaactacaacgagattttcaagggcagagccaccttctccgccgacacctctaagaacacagcctacctgcagatgaacagcctgagagccgaggacaccgccgtgtactactgcaccagaagagtgcccatccggctggattattggggccagggaacactggtcaccgtgtctagcacgcgtgccagcaccaagggacccagcgttttcccactggctccctgtagcagaagcaccagcgaatctacagccgctctgggctgcctggtcaaggactactttcctgagcctgtgaccgtgtcctggaacagcggagcactgacatctggcgtgcacacctttccagccgtgctgcaaagcagcggcctgtactctctgagcagcgtggtcacagtgccaagctctagcctgggcaccaagacctacacctgtaatgtggaccacaagcctagcaacaccaaggtggacaagcgcgtggaatctaagtacggacctcctgcacctccagcacctggatccggcagagccgattgcggctttaccagcgagagctaccagcagggcgtgctgagcgccaccatcctgtacgagatcctgctgggcaaggccaccctgtacgccgtgctggtgtctgccctggtgctgatggctatggtcaagcggaaggacagccggggataa

SEQ ID NO: 8952 - DNA, 2739 bp, synthetic construct
  source 1..2739: mol_type = other DNA
atggccttaccagtgaccgccttgctcctgccgctggccttgctgctccacgccgccaggccggacatccagttgacccagtcccccagctcactcagcgccagtgtgggggaccgggtgaccattacctgtaaagccagtcagagtgtggactatgacggggatagcttcctgaattggtatcagcagaagcctggcaaagccccaaagctgctgatctacgctgcatctaatctggagtcaggcgtgccttccaggttctccggtagtgggtctgggaccgatttcacattgaccatttcatccctccaacccgaggatttcgctacatattactgtcagcagtccaatgaggaccctctcacctttggccagggcaccaaagttgaaattaagagactcgagacagtggccgccccatctgtattcatctttcctccatctgatgaacagcttaagtccggcactgcttctgttgtttgcctgcttaacaatttttacccgcgggaagccaaggtgcaatggaaagtggacaacgccctgcagtctggtaacagtcaggaaagcgtgactgaacaggacagcaaagactccacatactccttgagttccaccttgacgctcagtaaggcagactacgagaagcacaaggtttatgcctgtgaagtgactcaccagggcctctctagcccagtgactaagtccttcaaccgcggggagtgtaggaagcgacgggggtcaggcgccactaacttctctctgctgaaacaagccggggacgtggaggagaatccaggtcccactagtatggactggatttggcgcatccttttccttgtcggcgctgctaccggcgcgcattccttcgaagaagtccaacttgtggagtctggagggggcctggtgcagcccggcggctctctcagactgtcttgtgcggcaagcggctacaccttcacctcttactggatagaatgggtgaggcaggcacctggaaagggactggagtggattggagagattctgccaggagggggagatacaaattacaatgaaatcttcaaggggcgggccaccttttcagcggataccagcaagaatacagcttacctgcagatgaatagcctccgggcagaagataccgctgtttattattgcacgagacgggtgccaataagactggactattgggggcaagggactcttgtcaccgtcagttcaacgcgtgcctctacaaagggaccctccgtgtttcctctggctccctgtagcagaagcaccagcgaatctacagccgctctgggctgcctggtcaaggactactttcctgagcctgtgaccgtgtcctggaacagcggagcactgacatctggcgtgcacacctttccagccgtgctccaaagcagcggcctgtactctctgagcagcgtggtcacagtgcctagctctagcctgggcaccaagacctacacctgtaatgtggaccacaagcctagcaacaccaaggtggacaagcgcgtggaatctaagtacggccctccttgtcctccatgtcctggtaccatccccgaggacacattcttcccaagccccgagagcagctgcgacgtgaagctggtggaaaagagcttcgagacagacaccaacctgaacttccagaacctgagcgtgatcggcttcagaatcctgctgctgaaagtggccggctttaacctgctgatgaccctgcggctgtggtccagccgcgccaagagaagcggatctggcgtgaagcagaccctgaatttcgacctgctgaagctggctggcgacgtggaatccaacccaggcccttctagcaccatggccctgcctgtgacagctctgctgctgcctctggcactgctgctgcacgccgccagacctttcgaggtgcagctggtggaatctggcggcggacttgttcaacctggcggctctctgagactgagctgtgccgcttctggctacaccttcagcagctactggatcgagtgggtccgacaggcccctggcaaaggactggaatggatcggagagatccttcctggcggaggcgacaccaactacaacgagattttcaagggcagagccaccttctccgccgacacctctaagaacacagcctacctgcagatgaacagcctgagagccgaggacaccgccgtgtactactgcaccagaagagtgcccatccggctggattattggggccagggaacactggtcaccgtgtctagcacgcgtgccagcaccaagggacccagcgttttcccactggctccctgtagcagaagcaccagcgaatctacagccgctctgggctgcctggtcaaggactactttcctgagcctgtgaccgtgtcctggaacagcggagcactgacatctggcgtgcacacctttccagccgtgctgcaaagcagcggcctgtactctctgagcagcgtggtcacagtgccaagctctagcctgggcaccaagacctacacctgtaatgtggaccacaagcctagcaacaccaaggtggacaagcgcgtggaatctaagtacggatccggcagagccgattgcggctttaccagcgagagctaccagcagggcgtgctgagcgccaccatcctgtacgagatcctgctgggcaaggccaccctgtacgccgtgctggtgtctgccctggtgctgatggctatggtcaagcggaaggacagccggggataa

SEQ ID NO: 8953 - DNA, 2748 bp, synthetic construct
  source 1..2748: mol_type = other DNA
atggccttaccagtgaccgccttgctcctgccgctggccttgctgctccacgccgccaggccggacatccagttgacccagtcccccagctcactcagcgccagtgtgggggaccgggtgaccattacctgtaaagccagtcagagtgtggactatgacggggatagcttcctgaattggtatcagcagaagcctggcaaagccccaaagctgctgatctacgctgcatctaatctggagtcaggcgtgccttccaggttctccggtagtgggtctgggaccgatttcacattgaccatttcatccctccaacccgaggatttcgctacatattactgtcagcagtccaatgaggaccctctcacctttggccagggcaccaaagttgaaattaagagactcgagacagtggccgccccatctgtattcatctttcctccatctgatgaacagcttaagtccggcactgcttctgttgtttgcctgcttaacaatttttacccgcgggaagccaaggtgcaatggaaagtggacaacgccctgcagtctggtaacagtcaggaaagcgtgactgaacaggacagcaaagactccacatactccttgagttccaccttgacgctcagtaaggcagactacgagaagcacaaggtttatgcctgtgaagtgactcaccagggcctctctagcccagtgactaagtccttcaaccgcggggagtgtaggaagcgacgggggtcaggcgccactaacttctctctgctgaaacaagccggggacgtggaggagaatccaggtcccactagtatggactggatttggcgcatccttttccttgtcggcgctgctaccggcgcgcattccttcgaagaagtccaacttgtggagtctggagggggcctggtgcagcccggcggctctctcagactgtcttgtgcggcaagcggctacaccttcacctcttactggatagaatgggtgaggcaggcacctggaaagggactggagtggattggagagattctgccaggagggggagatacaaattacaatgaaatcttcaaggggcgggccaccttttcagcggataccagcaagaatacagcttacctgcagatgaatagcctccgggcagaagataccgctgtttattattgcacgagacgggtgccaataagactggactattgggggcaagggactcttgtcaccgtcagttcaacgcgtgcctctacaaagggaccctccgtgtttcctctggctccctgtagcagaagcaccagcgaatctacagccgctctgggctgcctggtcaaggactactttcctgagcctgtgaccgtgtcctggaacagcggagcactgacatctggcgtgcacacctttccagccgtgctccaaagcagcggcctgtactctctgagcagcgtggtcacagtgcctagctctagcctgggcaccaagacctacacctgtaatgtggaccacaagcctagcaacaccaaggtggacaagcgcgtggaatctaagtacggccctccttgtcctccatgtcctggtaccatccccgaggacacattcttcccaagccccgagagcagctgcgacgtgaagctggtggaaaagagcttcgagacagacaccaacctgaacttccagaacctgagcgtgatcggcttcagaatcctgctgctgaaagtggccggctttaacctgctgatgaccctgcggctgtggtccagccgcgccaagagaagcggatctggcgtgaagcagaccctgaatttcgacctgctgaagctggctggcgacgtggaatccaacccaggcccttctagcaccatggccctgcctgtgacagctctgctgctgcctctggcactgctgctgcacgccgccagacctttcgaggtgcagctggtggaatctggcggcggacttgttcaacctggcggctctctgagactgagctgtgccgcttctggctacaccttcagcagctactggatcgagtgggtccgacaggcccctggcaaaggactggaatggatcggagagatccttcctggcggaggcgacaccaactacaacgagattttcaagggcagagccaccttctccgccgacacctctaagaacacagcctacctgcagatgaacagcctgagagccgaggacaccgccgtgtactactgcaccagaagagtgcccatccggctggattattggggccagggaacactggtcaccgtgtctagcacgcgtgccagcaccaagggacccagcgttttcccactggctccctgtagcagaagcaccagcgaatctacagccgctctgggctgcctggtcaaggactactttcctgagcctgtgaccgtgtcctggaacagcggagcactgacatctggcgtgcacacctttccagccgtgctgcaaagcagcggcctgtactctctgagcagcgtggtcacagtgccaagctctagcctgggcaccaagacctacacctgtaatgtggaccacaagcctagcaacaccaaggtggacaagcgcgtggaatctaagtacggacctcctggatccggcagagccgattgcggctttaccagcgagagctaccagcagggcgtgctgagcgccaccatcctgtacgagatcctgctgggcaaggccaccctgtacgccgtgctggtgtctgccctggtgctgatggctatggtcaagcggaaggacagccggggataa

SEQ ID NO: 8954 - DNA, 2748 bp, synthetic construct
  source 1..2748: mol_type = other DNA
atggccttaccagtgaccgccttgctcctgccgctggccttgctgctccacgccgccaggccggacatccagttgacccagtcccccagctcactcagcgccagtgtgggggaccgggtgaccattacctgtaaagccagtcagagtgtggactatgacggggatagcttcctgaattggtatcagcagaagcctggcaaagccccaaagctgctgatctacgctgcatctaatctggagtcaggcgtgccttccaggttctccggtagtgggtctgggaccgatttcacattgaccatttcatccctccaacccgaggatttcgctacatattactgtcagcagtccaatgaggaccctctcacctttggccagggcaccaaagttgaaattaagagactcgagacagtggccgccccatctgtattcatctttcctccatctgatgaacagcttaagtccggcactgcttctgttgtttgcctgcttaacaatttttacccgcgggaagccaaggtgcaatggaaagtggacaacgccctgcagtctggtaacagtcaggaaagcgtgactgaacaggacagcaaagactccacatactccttgagttccaccttgacgctcagtaaggcagactacgagaagcacaaggtttatgcctgtgaagtgactcaccagggcctctctagcccagtgactaagtccttcaaccgcggggagtgtaggaagcgacgggggtcaggcgccactaacttctctctgctgaaacaagccggggacgtggaggagaatccaggtcccactagtatggactggatttggcgcatccttttccttgtcggcgctgctaccggcgcgcattccttcgaagaagtccaacttgtggagtctggagggggcctggtgcagcccggcggctctctcagactgtcttgtgcggcaagcggctacaccttcacctcttactggatagaatgggtgaggcaggcacctggaaagggactggagtggattggagagattctgccaggagggggagatacaaattacaatgaaatcttcaaggggcgggccaccttttcagcggataccagcaagaatacagcttacctgcagatgaatagcctccgggcagaagataccgctgtttattattgcacgagacgggtgccaataagactggactattgggggcaagggactcttgtcaccgtcagttcaacgcgtgcctctacaaagggaccctccgtgtttcctctggctccctgtagcagaagcaccagcgaatctacagccgctctgggctgcctggtcaaggactactttcctgagcctgtgaccgtgtcctggaacagcggagcactgacatctggcgtgcacacctttccagccgtgctccaaagcagcggcctgtactctctgagcagcgtggtcacagtgcctagctctagcctgggcaccaagacctacacctgtaatgtggaccacaagcctagcaacaccaaggtggacaagcgcgtggaatctaagtacggccctcctggtaccatccccgaggacacattcttcccaagccccgagagcagctgcgacgtgaagctggtggaaaagagcttcgagacagacaccaacctgaacttccagaacctgagcgtgatcggcttcagaatcctgctgctgaaagtggccggctttaacctgctgatgaccctgcggctgtggtccagccgcgccaagagaagcggatctggcgtgaagcagaccctgaatttcgacctgctgaagctggctggcgacgtggaatccaacccaggcccttctagcaccatggccctgcctgtgacagctctgctgctgcctctggcactgctgctgcacgccgccagacctttcgaggtgcagctggtggaatctggcggcggacttgttcaacctggcggctctctgagactgagctgtgccgcttctggctacaccttcagcagctactggatcgagtgggtccgacaggcccctggcaaaggactggaatggatcggagagatccttcctggcggaggcgacaccaactacaacgagattttcaagggcagagccaccttctccgccgacacctctaagaacacagcctacctgcagatgaacagcctgagagccgaggacaccgccgtgtactactgcaccagaagagtgcccatccggctggattattggggccagggaacactggtcaccgtgtctagcacgcgtgccagcaccaagggacccagcgttttcccactggctccctgtagcagaagcaccagcgaatctacagccgctctgggctgcctggtcaaggactactttcctgagcctgtgaccgtgtcctggaacagcggagcactgacatctggcgtgcacacctttccagccgtgctgcaaagcagcggcctgtactctctgagcagcgtggtcacagtgccaagctctagcctgggcaccaagacctacacctgtaatgtggaccacaagcctagcaacaccaaggtggacaagcgcgtggaatctaagtacggacctcctgcacctccagcacctggatccggcagagccgattgcggctttaccagcgagagctaccagcagggcgtgctgagcgccaccatcctgtacgagatcctgctgggcaaggccaccctgtacgccgtgctggtgtctgccctggtgctgatggctatggtcaagcggaaggacagccggggataa

SEQ ID NO: 8955 - DNA, 2724 bp, synthetic construct
  source 1..2724: mol_type = other DNA
atggccttaccagtgaccgccttgctcctgccgctggccttgctgctccacgccgccaggccggacatccagttgacccagtcccccagctcactcagcgccagtgtgggggaccgggtgaccattacctgtaaagccagtcagagtgtggactatgacggggatagcttcctgaattggtatcagcagaagcctggcaaagccccaaagctgctgatctacgctgcatctaatctggagtcaggcgtgccttccaggttctccggtagtgggtctgggaccgatttcacattgaccatttcatccctccaacccgaggatttcgctacatattactgtcagcagtccaatgaggaccctctcacctttggccagggcaccaaagttgaaattaagagactcgagacagtggccgccccatctgtattcatctttcctccatctgatgaacagcttaagtccggcactgcttctgttgtttgcctgcttaacaatttttacccgcgggaagccaaggtgcaatggaaagtggacaacgccctgcagtctggtaacagtcaggaaagcgtgactgaacaggacagcaaagactccacatactccttgagttccaccttgacgctcagtaaggcagactacgagaagcacaaggtttatgcctgtgaagtgactcaccagggcctctctagcccagtgactaagtccttcaaccgcggggagtgtaggaagcgacgggggtcaggcgccactaacttctctctgctgaaacaagccggggacgtggaggagaatccaggtcccactagtatggactggatttggcgcatccttttccttgtcggcgctgctaccggcgcgcattccttcgaagaagtccaacttgtggagtctggagggggcctggtgcagcccggcggctctctcagactgtcttgtgcggcaagcggctacaccttcacctcttactggatagaatgggtgaggcaggcacctggaaagggactggagtggattggagagattctgccaggagggggagatacaaattacaatgaaatcttcaaggggcgggccaccttttcagcggataccagcaagaatacagcttacctgcagatgaatagcctccgggcagaagataccgctgtttattattgcacgagacgggtgccaataagactggactattgggggcaagggactcttgtcaccgtcagttcaacgcgtgcctctacaaagggaccctccgtgtttcctctggctccctgtagcagaagcaccagcgaatctacagccgctctgggctgcctggtcaaggactactttcctgagcctgtgaccgtgtcctggaacagcggagcactgacatctggcgtgcacacctttccagccgtgctccaaagcagcggcctgtactctctgagcagcgtggtcacagtgcctagctctagcctgggcaccaagacctacacctgtaatgtggaccacaagcctagcaacaccaaggtggacaagcgcgtggaatctaagtacggccctcctggtaccatccccgaggacacattcttcccaagccccgagagcagctgcgacgtgaagctggtggaaaagagcttcgagacagacaccaacctgaacttccagaacctgagcgtgatcggcttcagaatcctgctgctgaaagtggccggctttaacctgctgatgaccctgcggctgtggtccagccgcgccaagagaagcggatctggcgtgaagcagaccctgaatttcgacctgctgaagctggctggcgacgtggaatccaacccaggcccttctagcaccatggccctgcctgtgacagctctgctgctgcctctggcactgctgctgcacgccgccagacctttcgaggtgcagctggtggaatctggcggcggacttgttcaacctggcggctctctgagactgagctgtgccgcttctggctacaccttcagcagctactggatcgagtgggtccgacaggcccctggcaaaggactggaatggatcggagagatccttcctggcggaggcgacaccaactacaacgagattttcaagggcagagccaccttctccgccgacacctctaagaacacagcctacctgcagatgaacagcctgagagccgaggacaccgccgtgtactactgcaccagaagagtgcccatccggctggattattggggccagggaacactggtcaccgtgtctagcacgcgtgccagcaccaagggacccagcgttttcccactggctccctgtagcagaagcaccagcgaatctacagccgctctgggctgcctggtcaaggactactttcctgagcctgtgaccgtgtcctggaacagcggagcactgacatctggcgtgcacacctttccagccgtgctgcaaagcagcggcctgtactctctgagcagcgtggtcacagtgccaagctctagcctgggcaccaagacctacacctgtaatgtggaccacaagcctagcaacaccaaggtggacaagcgcgtggaatctaagtacggatccggcagagccgattgcggctttaccagcgagagctaccagcagggcgtgctgagcgccaccatcctgtacgagatcctgctgggcaaggccaccctgtacgccgtgctggtgtctgccctggtgctgatggctatggtcaagcggaaggacagccggggataa

SEQ ID NO: 8956 - DNA, 2733 bp, synthetic construct
  source 1..2733: mol_type = other DNA
atggccttaccagtgaccgccttgctcctgccgctggccttgctgctccacgccgccaggccggacatccagttgacccagtcccccagctcactcagcgccagtgtgggggaccgggtgaccattacctgtaaagccagtcagagtgtggactatgacggggatagcttcctgaattggtatcagcagaagcctggcaaagccccaaagctgctgatctacgctgcatctaatctggagtcaggcgtgccttccaggttctccggtagtgggtctgggaccgatttcacattgaccatttcatccctccaacccgaggatttcgctacatattactgtcagcagtccaatgaggaccctctcacctttggccagggcaccaaagttgaaattaagagactcgagacagtggccgccccatctgtattcatctttcctccatctgatgaacagcttaagtccggcactgcttctgttgtttgcctgcttaacaatttttacccgcgggaagccaaggtgcaatggaaagtggacaacgccctgcagtctggtaacagtcaggaaagcgtgactgaacaggacagcaaagactccacatactccttgagttccaccttgacgctcagtaaggcagactacgagaagcacaaggtttatgcctgtgaagtgactcaccagggcctctctagcccagtgactaagtccttcaaccgcggggagtgtaggaagcgacgggggtcaggcgccactaacttctctctgctgaaacaagccggggacgtggaggagaatccaggtcccactagtatggactggatttggcgcatccttttccttgtcggcgctgctaccggcgcgcattccttcgaagaagtccaacttgtggagtctggagggggcctggtgcagcccggcggctctctcagactgtcttgtgcggcaagcggctacaccttcacctcttactggatagaatgggtgaggcaggcacctggaaagggactggagtggattggagagattctgccaggagggggagatacaaattacaatgaaatcttcaaggggcgggccaccttttcagcggataccagcaagaatacagcttacctgcagatgaatagcctccgggcagaagataccgctgtttattattgcacgagacgggtgccaataagactggactattgggggcaagggactcttgtcaccgtcagttcaacgcgtgcctctacaaagggaccctccgtgtttcctctggctccctgtagcagaagcaccagcgaatctacagccgctctgggctgcctggtcaaggactactttcctgagcctgtgaccgtgtcctggaacagcggagcactgacatctggcgtgcacacctttccagccgtgctccaaagcagcggcctgtactctctgagcagcgtggtcacagtgcctagctctagcctgggcaccaagacctacacctgtaatgtggaccacaagcctagcaacaccaaggtggacaagcgcgtggaatctaagtacggccctcctggtaccatccccgaggacacattcttcccaagccccgagagcagctgcgacgtgaagctggtggaaaagagcttcgagacagacaccaacctgaacttccagaacctgagcgtgatcggcttcagaatcctgctgctgaaagtggccggctttaacctgctgatgaccctgcggctgtggtccagccgcgccaagagaagcggatctggcgtgaagcagaccctgaatttcgacctgctgaagctggctggcgacgtggaatccaacccaggcccttctagcaccatggccctgcctgtgacagctctgctgctgcctctggcactgctgctgcacgccgccagacctttcgaggtgcagctggtggaatctggcggcggacttgttcaacctggcggctctctgagactgagctgtgccgcttctggctacaccttcagcagctactggatcgagtgggtccgacaggcccctggcaaaggactggaatggatcggagagatccttcctggcggaggcgacaccaactacaacgagattttcaagggcagagccaccttctccgccgacacctctaagaacacagcctacctgcagatgaacagcctgagagccgaggacaccgccgtgtactactgcaccagaagagtgcccatccggctggattattggggccagggaacactggtcaccgtgtctagcacgcgtgccagcaccaagggacccagcgttttcccactggctccctgtagcagaagcaccagcgaatctacagccgctctgggctgcctggtcaaggactactttcctgagcctgtgaccgtgtcctggaacagcggagcactgacatctggcgtgcacacctttccagccgtgctgcaaagcagcggcctgtactctctgagcagcgtggtcacagtgccaagctctagcctgggcaccaagacctacacctgtaatgtggaccacaagcctagcaacaccaaggtggacaagcgcgtggaatctaagtacggacctcctggatccggcagagccgattgcggctttaccagcgagagctaccagcagggcgtgctgagcgccaccatcctgtacgagatcctgctgggcaaggccaccctgtacgccgtgctggtgtctgccctggtgctgatggctatggtcaagcggaaggacagccggggataa

SEQ ID NO: 8957 - DNA, 2727 bp, synthetic construct
  source 1..2727: mol_type = other DNA
atggccttaccagtgaccgccttgctcctgccgctggccttgctgctccacgccgccaggccggacatccagttgacccagtcccccagctcactcagcgccagtgtgggggaccgggtgaccattacctgtaaagccagtcagagtgtggactatgacggggatagcttcctgaattggtatcagcagaagcctggcaaagccccaaagctgctgatctacgctgcatctaatctggagtcaggcgtgccttccaggttctccggtagtgggtctgggaccgatttcacattgaccatttcatccctccaacccgaggatttcgctacatattactgtcagcagtccaatgaggaccctctcacctttggccagggcaccaaagttgaaattaagagactcgagacagtggccgccccatctgtattcatctttcctccatctgatgaacagcttaagtccggcactgcttctgttgtttgcctgcttaacaatttttacccgcgggaagccaaggtgcaatggaaagtggacaacgccctgcagtctggtaacagtcaggaaagcgtgactgaacaggacagcaaagactccacatactccttgagttccaccttgacgctcagtaaggcagactacgagaagcacaaggtttatgcctgtgaagtgactcaccagggcctctctagcccagtgactaagtccttcaaccgcggggagtgtaggaagcgacgggggtcaggcgccactaacttctctctgctgaaacaagccggggacgtggaggagaatccaggtcccactagtatggactggatttggcgcatccttttccttgtcggcgctgctaccggcgcgcattccttcgaagaagtccaacttgtggagtctggagggggcctggtgcagcccggcggctctctcagactgtcttgtgcggcaagcggctacaccttcacctcttactggatagaatgggtgaggcaggcacctggaaagggactggagtggattggagagattctgccaggagggggagatacaaattacaatgaaatcttcaaggggcgggccaccttttcagcggataccagcaagaatacagcttacctgcagatgaatagcctccgggcagaagataccgctgtttattattgcacgagacgggtgccaataagactggactattgggggcaagggactcttgtcaccgtcagttcaacgcgtgcctctacaaagggaccctccgtgtttcctctggctccctgtagcagaagcaccagcgaatctacagccgctctgggctgcctggtcaaggactactttcctgagcctgtgaccgtgtcctggaacagcggagcactgacatctggcgtgcacacctttccagccgtgctccaaagcagcggcctgtactctctgagcagcgtggtcacagtgcctagctctagcctgggcaccaagacctacacctgtaatgtggaccacaagcctagcaacaccaaggtggacaagcgcgtgggtaccatccccgaggacacattcttcccaagccccgagagcagctgcgacgtgaagctggtggaaaagagcttcgagacagacaccaacctgaacttccagaacctgagcgtgatcggcttcagaatcctgctgctgaaagtggccggctttaacctgctgatgaccctgcggctgtggtccagccgcgccaagagaagcggatctggcgtgaagcagaccctgaatttcgacctgctgaagctggctggcgacgtggaatccaacccaggcccttctagcaccatggccctgcctgtgacagctctgctgctgcctctggcactgctgctgcacgccgccagacctttcgaggtgcagctggtggaatctggcggcggacttgttcaacctggcggctctctgagactgagctgtgccgcttctggctacaccttcagcagctactggatcgagtgggtccgacaggcccctggcaaaggactggaatggatcggagagatccttcctggcggaggcgacaccaactacaacgagattttcaagggcagagccaccttctccgccgacacctctaagaacacagcctacctgcagatgaacagcctgagagccgaggacaccgccgtgtactactgcaccagaagagtgcccatccggctggattattggggccagggaacactggtcaccgtgtctagcacgcgtgccagcaccaagggacccagcgttttcccactggctccctgtagcagaagcaccagcgaatctacagccgctctgggctgcctggtcaaggactactttcctgagcctgtgaccgtgtcctggaacagcggagcactgacatctggcgtgcacacctttccagccgtgctgcaaagcagcggcctgtactctctgagcagcgtggtcacagtgccaagctctagcctgggcaccaagacctacacctgtaatgtggaccacaagcctagcaacaccaaggtggacaagcgcgtggaatctaagtacggacctcctgcacctccagcacctggatccggcagagccgattgcggctttaccagcgagagctaccagcagggcgtgctgagcgccaccatcctgtacgagatcctgctgggcaaggccaccctgtacgccgtgctggtgtctgccctggtgctgatggctatggtcaagcggaaggacagccggggataa

SEQ ID NO: 8958 - DNA, 2703 bp, synthetic construct
  source 1..2703: mol_type = other DNA
atggccttaccagtgaccgccttgctcctgccgctggccttgctgctccacgccgccaggccggacatccagttgacccagtcccccagctcactcagcgccagtgtgggggaccgggtgaccattacctgtaaagccagtcagagtgtggactatgacggggatagcttcctgaattggtatcagcagaagcctggcaaagccccaaagctgctgatctacgctgcatctaatctggagtcaggcgtgccttccaggttctccggtagtgggtctgggaccgatttcacattgaccatttcatccctccaacccgaggatttcgctacatattactgtcagcagtccaatgaggaccctctcacctttggccagggcaccaaagttgaaattaagagactcgagacagtggccgccccatctgtattcatctttcctccatctgatgaacagcttaagtccggcactgcttctgttgtttgcctgcttaacaatttttacccgcgggaagccaaggtgcaatggaaagtggacaacgccctgcagtctggtaacagtcaggaaagcgtgactgaacaggacagcaaagactccacatactccttgagttccaccttgacgctcagtaaggcagactacgagaagcacaaggtttatgcctgtgaagtgactcaccagggcctctctagcccagtgactaagtccttcaaccgcggggagtgtaggaagcgacgggggtcaggcgccactaacttctctctgctgaaacaagccggggacgtggaggagaatccaggtcccactagtatggactggatttggcgcatccttttccttgtcggcgctgctaccggcgcgcattccttcgaagaagtccaacttgtggagtctggagggggcctggtgcagcccggcggctctctcagactgtcttgtgcggcaagcggctacaccttcacctcttactggatagaatgggtgaggcaggcacctggaaagggactggagtggattggagagattctgccaggagggggagatacaaattacaatgaaatcttcaaggggcgggccaccttttcagcggataccagcaagaatacagcttacctgcagatgaatagcctccgggcagaagataccgctgtttattattgcacgagacgggtgccaataagactggactattgggggcaagggactcttgtcaccgtcagttcaacgcgtgcctctacaaagggaccctccgtgtttcctctggctccctgtagcagaagcaccagcgaatctacagccgctctgggctgcctggtcaaggactactttcctgagcctgtgaccgtgtcctggaacagcggagcactgacatctggcgtgcacacctttccagccgtgctccaaagcagcggcctgtactctctgagcagcgtggtcacagtgcctagctctagcctgggcaccaagacctacacctgtaatgtggaccacaagcctagcaacaccaaggtggacaagcgcgtgggtaccatccccgaggacacattcttcccaagccccgagagcagctgcgacgtgaagctggtggaaaagagcttcgagacagacaccaacctgaacttccagaacctgagcgtgatcggcttcagaatcctgctgctgaaagtggccggctttaacctgctgatgaccctgcggctgtggtccagccgcgccaagagaagcggatctggcgtgaagcagaccctgaatttcgacctgctgaagctggctggcgacgtggaatccaacccaggcccttctagcaccatggccctgcctgtgacagctctgctgctgcctctggcactgctgctgcacgccgccagacctttcgaggtgcagctggtggaatctggcggcggacttgttcaacctggcggctctctgagactgagctgtgccgcttctggctacaccttcagcagctactggatcgagtgggtccgacaggcccctggcaaaggactggaatggatcggagagatccttcctggcggaggcgacaccaactacaacgagattttcaagggcagagccaccttctccgccgacacctctaagaacacagcctacctgcagatgaacagcctgagagccgaggacaccgccgtgtactactgcaccagaagagtgcccatccggctggattattggggccagggaacactggtcaccgtgtctagcacgcgtgccagcaccaagggacccagcgttttcccactggctccctgtagcagaagcaccagcgaatctacagccgctctgggctgcctggtcaaggactactttcctgagcctgtgaccgtgtcctggaacagcggagcactgacatctggcgtgcacacctttccagccgtgctgcaaagcagcggcctgtactctctgagcagcgtggtcacagtgccaagctctagcctgggcaccaagacctacacctgtaatgtggaccacaagcctagcaacaccaaggtggacaagcgcgtggaatctaagtacggatccggcagagccgattgcggctttaccagcgagagctaccagcagggcgtgctgagcgccaccatcctgtacgagatcctgctgggcaaggccaccctgtacgccgtgctggtgtctgccctggtgctgatggctatggtcaagcggaaggacagccggggataa

SEQ ID NO: 8959 - DNA, 2712 bp, synthetic construct
  source 1..2712: mol_type = other DNA
atggccttaccagtgaccgccttgctcctgccgctggccttgctgctccacgccgccaggccggacatccagttgacccagtcccccagctcactcagcgccagtgtgggggaccgggtgaccattacctgtaaagccagtcagagtgtggactatgacggggatagcttcctgaattggtatcagcagaagcctggcaaagccccaaagctgctgatctacgctgcatctaatctggagtcaggcgtgccttccaggttctccggtagtgggtctgggaccgatttcacattgaccatttcatccctccaacccgaggatttcgctacatattactgtcagcagtccaatgaggaccctctcacctttggccagggcaccaaagttgaaattaagagactcgagacagtggccgccccatctgtattcatctttcctccatctgatgaacagcttaagtccggcactgcttctgttgtttgcctgcttaacaatttttacccgcgggaagccaaggtgcaatggaaagtggacaacgccctgcagtctggtaacagtcaggaaagcgtgactgaacaggacagcaaagactccacatactccttgagttccaccttgacgctcagtaaggcagactacgagaagcacaaggtttatgcctgtgaagtgactcaccagggcctctctagcccagtgactaagtccttcaaccgcggggagtgtaggaagcgacgggggtcaggcgccactaacttctctctgctgaaacaagccggggacgtggaggagaatccaggtcccactagtatggactggatttggcgcatccttttccttgtcggcgctgctaccggcgcgcattccttcgaagaagtccaacttgtggagtctggagggggcctggtgcagcccggcggctctctcagactgtcttgtgcggcaagcggctacaccttcacctcttactggatagaatgggtgaggcaggcacctggaaagggactggagtggattggagagattctgccaggagggggagatacaaattacaatgaaatcttcaaggggcgggccaccttttcagcggataccagcaagaatacagcttacctgcagatgaatagcctccgggcagaagataccgctgtttattattgcacgagacgggtgccaataagactggactattgggggcaagggactcttgtcaccgtcagttcaacgcgtgcctctacaaagggaccctccgtgtttcctctggctccctgtagcagaagcaccagcgaatctacagccgctctgggctgcctggtcaaggactactttcctgagcctgtgaccgtgtcctggaacagcggagcactgacatctggcgtgcacacctttccagccgtgctccaaagcagcggcctgtactctctgagcagcgtggtcacagtgcctagctctagcctgggcaccaagacctacacctgtaatgtggaccacaagcctagcaacaccaaggtggacaagcgcgtgggtaccatccccgaggacacattcttcccaagccccgagagcagctgcgacgtgaagctggtggaaaagagcttcgagacagacaccaacctgaacttccagaacctgagcgtgatcggcttcagaatcctgctgctgaaagtggccggctttaacctgctgatgaccctgcggctgtggtccagccgcgccaagagaagcggatctggcgtgaagcagaccctgaatttcgacctgctgaagctggctggcgacgtggaatccaacccaggcccttctagcaccatggccctgcctgtgacagctctgctgctgcctctggcactgctgctgcacgccgccagacctttcgaggtgcagctggtggaatctggcggcggacttgttcaacctggcggctctctgagactgagctgtgccgcttctggctacaccttcagcagctactggatcgagtgggtccgacaggcccctggcaaaggactggaatggatcggagagatccttcctggcggaggcgacaccaactacaacgagattttcaagggcagagccaccttctccgccgacacctctaagaacacagcctacctgcagatgaacagcctgagagccgaggacaccgccgtgtactactgcaccagaagagtgcccatccggctggattattggggccagggaacactggtcaccgtgtctagcacgcgtgccagcaccaagggacccagcgttttcccactggctccctgtagcagaagcaccagcgaatctacagccgctctgggctgcctggtcaaggactactttcctgagcctgtgaccgtgtcctggaacagcggagcactgacatctggcgtgcacacctttccagccgtgctgcaaagcagcggcctgtactctctgagcagcgtggtcacagtgccaagctctagcctgggcaccaagacctacacctgtaatgtggaccacaagcctagcaacaccaaggtggacaagcgcgtggaatctaagtacggacctcctggatccggcagagccgattgcggctttaccagcgagagctaccagcagggcgtgctgagcgccaccatcctgtacgagatcctgctgggcaaggccaccctgtacgccgtgctggtgtctgccctggtgctgatggctatggtcaagcggaaggacagccggggataa

SEQ ID NO: 8960 - DNA, 1785 bp, synthetic construct
  source 1..1785: mol_type = other DNA
atggccttaccagtgaccgccttgctcctgccgctggccttgctgctccacgccgccaggccgcaagttcagctggtggaaagcggtggtggcgttgtgcaacctggtagaagtctgaggcttagctgcgccgccagcttttctggatacggcgtgtcaacaatgggatggtttaggcaggctccaggcaagggccttgaaggcgtggccgctatcacagtcggctccggcaatacctactacgccgatagcgtgagaggcaggttcacaatctccagagacaacagcaagaatacggtgtacctgcaaatgaacagcctccgcgccgaggatacagccatgtattactgtgccgtgggctacctgtctggcggctcttgggatgtgcccggcagatacaattactggggacagggaaccctggttaccgtgtctagtctcgagacagtggccgccccatctgtattcatctttcctccatctgatgaacagcttaagtccggcactgcttctgttgtttgcctgcttaacaatttttacccgcgggaagccaaggtgcaatggaaagtggacaacgccctgcagtctggtaacagtcaggaaagcgtgactgaacaggacagcaaagactccacatactccttgagttccaccttgacgctcagtaaggcagactacgagaagcacaaggtttatgcctgtgaagtgactcaccagggcctctctagcccagtgactaagtccttcaaccgcggggagtgtaggaagcgacgggggtcaggcgccactaacttctctctgctgaaacaagccggggacgtggaggagaatccaggtcccactagtatggactggatttggcgcatccttttccttgtcggcgctgctaccggcgcgcattccttcgaagtgcaactggttgaatccggtggcggcctggtgcaagcaggcggatctctcagacttagctgtgccgcctccggcagaaccttcacaatgggatggtttaggcaggctccagggaaagagagagagttcgtcgccgccatctctctgtctcccacactggcctactacgccgactctgtgaaaggccggttcaccatctccagagataatgccaagaacaccgtggtgctgcaaatgaactctctgaaacccgaggatacagccctgtactattgtgccgctgaccggaagtccgtgatgagcatcagacccgattactggggacagggcacacaagtcacagtgtcctctacgcgtgcctctacaaagggaccctccgtgtttcctctggctccctgtagcagaagcaccagcgaatctacagccgctctgggctgcctggtcaaggactactttcctgagcctgtgaccgtgtcctggaacagcggagcactgacatctggcgtgcacacctttccagccgtgctccaaagcagcggcctgtactctctgagcagcgtggtcacagtgcctagctctagcctgggcaccaagacctacacctgtaatgtggaccacaagcctagcaacaccaaggtggacaagcgcgtggaatctaagtacggccctccttgtcctccatgtcctggtaccatccccgaggacacattcttcccaagccccgagagcagctgcgacgtgaagctggtggaaaagagcttcgagacagacaccaacctgaacttccagaacctgagcgtgatcggcttcagaatcctgctgctgaaagtggccggctttaacctgctgatgaccctgcggctgtggtccagctaa

SEQ ID NO: 8961 - DNA, 2508 bp, synthetic construct
  source 1..2508: mol_type = other DNA
atggccttaccagtgaccgccttgctcctgccgctggccttgctgctccacgccgccaggccgcaggtgcagctggttgaatctggcggaggactggttcagcctggcggatctctgagactgtcttgtgccgccagcggcagcatcaacagcagatcctgcatgggctggttcagacaggcccctggcaagggaagagaaggcgtggcagctatcggacaagtgaccggcagaacctactacgtggacagcgtgaagggcagattcaccatcagcctggacaacagcaagaacaccctgtacctccagatgaacagcctgagagccgaggacaccgccgtgtactattgtgctgctgcccctggctgtctgctgtctgcacttagaagcgccgactacagaaactggggccagggcacactggtcaccgtttcttctctcgagacagtggccgccccatctgtattcatctttcctccatctgatgaacagcttaagtccggcactgcttctgttgtttgcctgcttaacaatttttacccgcgggaagccaaggtgcaatggaaagtggacaacgccctgcagtctggtaacagtcaggaaagcgtgactgaacaggacagcaaagactccacatactccttgagttccaccttgacgctcagtaaggcagactacgagaagcacaaggtttatgcctgtgaagtgactcaccagggcctctctagcccagtgactaagtccttcaaccgcggggagtgtaggaagcgacgggggtcaggcgccactaacttctctctgctgaaacaagccggggacgtggaggagaatccaggtcccactagtatggactggatttggcgcatccttttccttgtcggcgctgctaccggcgcgcattccttcgaagtgcaactggttgaatccggtggcggcctggtgcaagcaggcggatctctcagacttagctgtgccgcctccggcagaaccttcacaatgggatggtttaggcaggctccagggaaagagagagagttcgtcgccgccatctctctgtctcccacactggcctactacgccgactctgtgaaaggccggttcaccatctccagagataatgccaagaacaccgtggtgctgcaaatgaactctctgaaacccgaggatacagccctgtactattgtgccgctgaccggaagtccgtgatgagcatcagacccgattactggggacagggcacacaagtcacagtgtcctctacgcgtgcctctacaaagggaccctccgtgtttcctctggctccctgtagcagaagcaccagcgaatctacagccgctctgggctgcctggtcaaggactactttcctgagcctgtgaccgtgtcctggaacagcggagcactgacatctggcgtgcacacctttccagccgtgctccaaagcagcggcctgtactctctgagcagcgtggtcacagtgcctagctctagcctgggcaccaagacctacacctgtaatgtggaccacaagcctagcaacaccaaggtggacaagcgcgtggaatctaagtacggccctcctggacctccaggacctggtaccgaagtgaaaaccgactccaccgaccacgtgaagcccaaagagacagagaacaccaagcagcccagcaagagctgccacaagcccaaggccatcgtgcacaccgagaaagtgaacatgatgagcctgaccgtgatcggcttcagaatcctgctgctgaaagtggccggctttaacctgctgatgaccctgcggctgtggtccagccgcgccaagagaagcggatctggcgtgaagcagaccctgaatttcgacctgctgaagctggctggcgacgtggaatccaacccaggcccttctagaggccatatgaccgagtacaagcccacggtgcgcctcgccacccgcgacgacgtccccagggccgtacgcaccctcgccgccgcgttcgccgactaccccgccacgcgccacaccgtcgatccggaccgccacatcgagcgggtcaccgagctgcaagaactcttcctcacgcgcgtcgggctcgacatcggcaaggtgtgggtcgcggacgacggcgccgcggtggcggtctggaccacgccggagagcgtcgaagcgggggcggtgttcgccgagatcggcccgcgcatggccgagttgagcggttcccggctggccgcgcagcaacagatggaaggcctcctggcgccgcaccggcccaaggagcccgcgtggttcctggccaccgtcggcgtctcgcccgaccaccagggcaagggtctgggcagcgccgtcgtgctccccggagtggaggcggccgagcgcgccggggtgcccgccttcctggagacctccgcgccccgcaacctccccttctacgagcggctcggcttcaccgtcaccgccgacgtcgaggtgcccgaaggaccgcgcacctggtgcatgacccgcaagcccggtgcctga

SEQ ID NO: 8962 - DNA, 2448 bp, synthetic construct
  source 1..2448: mol_type = other DNA
atggccttaccagtgaccgccttgctcctgccgctggccttgctgctccacgccgccaggccggagatcgtgctgacacagtctcccgccacactgtcactgtctccaggcgaaagagccacactgagctgtagagccagccagagcgtgtcctcttacctggcctggtatcagcagaagcctggacaggctccccggctgctgatctacgatgccagcaatagagccacaggcatccccgccagattttctggctctggcagcggcaccgatttcaccctgaccataagcagcctggaacctgaggacttcgccgtgtactactgccagcagagaagcaactggcccctgacctttggacagggcaccaaggtggaaatcaagagactcgagacagtggccgccccatctgtattcatctttcctccatctgatgaacagcttaagtccggcactgcttctgttgtttgcctgcttaacaatttttacccgcgggaagccaaggtgcaatggaaagtggacaacgccctgcagtctggtaacagtcaggaaagcgtgactgaacaggacagcaaagactccacatactccttgagttccaccttgacgctcagtaaggcagactacgagaagcacaaggtttatgcctgtgaagtgactcaccagggcctctctagcccagtgactaagtccttcaaccgcggggagtgtaggaagcgacgggggtcaggcgccactaacttctctctgctgaaacaagccggggacgtggaggagaatccaggtcccactagtatggactggatttggcgcatccttttccttgtcggcgctgctaccggcgcgcattccttcgaagaagtgcagctggtggaatcaggcggcggactggtgcagcctggcagaagcctgagactgagctgtgccgccagcggcttcaccttcaacgactacgccatgcactgggtgcgccaggcccctggaaaaggactggaatgggtgtccacaatcagctggaacagcggcagcatcggctacgccgatagcgtgaagggccggttcaccatcagccgggacaacgccaagaagtccctgtacctccagatgaacagcctgcgggccgaggacacagccctgtactattgcgccaaggacatccagtacggcaactactactacggcatggacgtgtggggccagggaaccaccgtgaccgtgtcatctacgcgtgcctctacaaagggaccctccgtgtttcctctggctccctgtagcagaagcaccagcgaatctacagccgctctgggctgcctggtcaaggactactttcctgagcctgtgaccgtgtcctggaacagcggagcactgacatctggcgtgcacacctttccagccgtgctccaaagcagcggcctgtactctctgagcagcgtggtcacagtgcctagctctagcctgggcaccaagacctacacctgtaatgtggaccacaagcctagcaacaccaaggtggacaagcgcgtggaatctaagtacggccctccttgtcctccatgtcctggtaccatccccgaggacacattcttcccaagccccgagagcagctgcgacgtgaagctggtggaaaagagcttcgagacagacaccaacctgaacttccagaacctgagcgtgatcggcttcagaatcctgctgctgaaagtggccggctttaacctgctgatgaccctgcggctgtggtccagccgcgccaagagaagcggatctggcgtgaagcagaccctgaatttcgacctgctgaagctggctggcgacgtggaatccaacccaggcccttctagaggccatatgaccgagtacaagcccacggtgcgcctcgccacccgcgacgacgtccccagggccgtacgcaccctcgccgccgcgttcgccgactaccccgccacgcgccacaccgtcgatccggaccgccacatcgagcgggtcaccgagctgcaagaactcttcctcacgcgcgtcgggctcgacatcggcaaggtgtgggtcgcggacgacggcgccgcggtggcggtctggaccacgccggagagcgtcgaagcgggggcggtgttcgccgagatcggcccgcgcatggccgagttgagcggttcccggctggccgcgcagcaacagatggaaggcctcctggcgccgcaccggcccaaggagcccgcgtggttcctggccaccgtcggcgtctcgcccgaccaccagggcaagggtctgggcagcgccgtcgtgctccccggagtggaggcggccgagcgcgccggggtgcccgccttcctggagacctccgcgccccgcaacctccccttctacgagcggctcggcttcaccgtcaccgccgacgtcgaggtgcccgaaggaccgcgcacctggtgcatgacccgcaagcccggtgcctga

SEQ ID NO: 8963 - DNA, 2445 bp, synthetic construct
  source 1..2445: mol_type = other DNA
atggccttaccagtgaccgccttgctcctgccgctggccttgctgctccacgccgccaggccggagatcgtgctgacacagtctcccgccacactgtcactgtctccaggcgaaagagccacactgagctgtagagccagccagagcgtgtcctcttacctggcctggtatcagcagaagcctggacaggctccccggctgctgatctacgatgccagcaatagagccacaggcatccccgccagattttctggctctggcagcggcaccgatttcaccctgaccataagcagcctggaacctgaggacttcgccgtgtactactgccagcagagaagcaactggcccctgacctttggacagggcaccaaggtggaaatcaaactcgagacagtggccgccccatctgtattcatctttcctccatctgatgaacagcttaagtccggcactgcttctgttgtttgcctgcttaacaatttttacccgcgggaagccaaggtgcaatggaaagtggacaacgccctgcagtctggtaacagtcaggaaagcgtgactgaacaggacagcaaagactccacatactccttgagttccaccttgacgctcagtaaggcagactacgagaagcacaaggtttatgcctgtgaagtgactcaccagggcctctctagcccagtgactaagtccttcaaccgcggggagtgtaggaagcgacgggggtcaggcgccactaacttctctctgctgaaacaagccggggacgtggaggagaatccaggtcccactagtatggactggatttggcgcatccttttccttgtcggcgctgctaccggcgcgcattccttcgaagaagtgcagctggtggaatcaggcggcggactggtgcagcctggcagaagcctgagactgagctgtgccgccagcggcttcaccttcaacgactacgccatgcactgggtgcgccaggcccctggaaaaggactggaatgggtgtccacaatcagctggaacagcggcagcatcggctacgccgatagcgtgaagggccggttcaccatcagccgggacaacgccaagaagtccctgtacctccagatgaacagcctgcgggccgaggacacagccctgtactattgcgccaaggacatccagtacggcaactactactacggcatggacgtgtggggccagggaaccaccgtgaccgtgtcatctacgcgtgcctctacaaagggaccctccgtgtttcctctggctccctgtagcagaagcaccagcgaatctacagccgctctgggctgcctggtcaaggactactttcctgagcctgtgaccgtgtcctggaacagcggagcactgacatctggcgtgcacacctttccagccgtgctccaaagcagcggcctgtactctctgagcagcgtggtcacagtgcctagctctagcctgggcaccaagacctacacctgtaatgtggaccacaagcctagcaacaccaaggtggacaagcgcgtggaatctaagtacggccctccttgtcctccatgtcctggtaccatccccgaggacacattcttcccaagccccgagagcagctgcgacgtgaagctggtggaaaagagcttcgagacagacaccaacctgaacttccagaacctgagcgtgatcggcttcagaatcctgctgctgaaagtggccggctttaacctgctgatgaccctgcggctgtggtccagccgcgccaagagaagcggatctggcgtgaagcagaccctgaatttcgacctgctgaagctggctggcgacgtggaatccaacccaggcccttctagaggccatatgaccgagtacaagcccacggtgcgcctcgccacccgcgacgacgtccccagggccgtacgcaccctcgccgccgcgttcgccgactaccccgccacgcgccacaccgtcgatccggaccgccacatcgagcgggtcaccgagctgcaagaactcttcctcacgcgcgtcgggctcgacatcggcaaggtgtgggtcgcggacgacggcgccgcggtggcggtctggaccacgccggagagcgtcgaagcgggggcggtgttcgccgagatcggcccgcgcatggccgagttgagcggttcccggctggccgcgcagcaacagatggaaggcctcctggcgccgcaccggcccaaggagcccgcgtggttcctggccaccgtcggcgtctcgcccgaccaccagggcaagggtctgggcagcgccgtcgtgctccccggagtggaggcggccgagcgcgccggggtgcccgccttcctggagacctccgcgccccgcaacctccccttctacgagcggctcggcttcaccgtcaccgccgacgtcgaggtgcccgaaggaccgcgcacctggtgcatgacccgcaagcccggtgcctga

SEQ ID NO: 8964 - DNA, 2448 bp, synthetic construct; identical to SEQ ID NO: 8740
  source 1..2448: mol_type = other DNA

SEQ ID NO: 8965 - DNA, 2445 bp, synthetic construct
  source 1..2445: mol_type = other DNA
atggccttaccagtgaccgccttgctcctgccgctggccttgctgctccacgccgccaggccggagatcgtgctgacacagagccctgccaccctgtctctgagccctggcgaaagagccaccctgagctgtagagccagccagagcgtgcggagctacctggcctggtatcagcagaagcctggacaggcccccagactgctgatctacgacgccagcaatcgggccacaggcatccccgccagattttctggctctggcagcggcaccgacttcaccctgacaatcagcagcctggaacccgaggacttcgccgtgtactactgccagcagcggagcaactggccccctacctttggacagggcaccaaggtggaaatcaagctcgagacagtggccgccccatctgtattcatctttcctccatctgatgaacagcttaagtccggcactgcttctgttgtttgcctgcttaacaatttttacccgcgggaagccaaggtgcaatggaaagtggacaacgccctgcagtctggtaacagtcaggaaagcgtgactgaacaggacagcaaagactccacatactccttgagttccaccttgacgctcagtaaggcagactacgagaagcacaaggtttatgcctgtgaagtgactcaccagggcctctctagcccagtgactaagtccttcaaccgcggggagtgtaggaagcgacgggggtcaggcgccactaacttctctctgctgaaacaagccggggacgtggaggagaatccaggtcccactagtatggactggatttggcgcatccttttccttgtcggcgctgctaccggcgcgcattccttcgaagaagtgcagctggtggaatcaggcggcggactggtgcagcctggcagaagcctgagactgagctgtgccgccagcggcttcaccttcaacgactacgccatgcactgggtgcgccaggcccctggaaaaggactggaatgggtgtccacaatcagctggaacagcggcagcatcggctacgccgatagcgtgaagggccggttcaccatcagccgggacaacgccaagaagtccctgtacctccagatgaacagcctgcgggccgaggacacagccctgtactattgcgccaaggacatccagtacggcaactactactacggcatggacgtgtggggccagggaaccaccgtgaccgtgtcatctacgcgtgcctctacaaagggaccctccgtgtttcctctggctccctgtagcagaagcaccagcgaatctacagccgctctgggctgcctggtcaaggactactttcctgagcctgtgaccgtgtcctggaacagcggagcactgacatctggcgtgcacacctttccagccgtgctccaaagcagcggcctgtactctctgagcagcgtggtcacagtgcctagctctagcctgggcaccaagacctacacctgtaatgtggaccacaagcctagcaacaccaaggtggacaagcgcgtggaatctaagtacggccctccttgtcctccatgtcctggtaccatccccgaggacacattcttcccaagccccgagagcagctgcgacgtgaagctggtggaaaagagcttcgagacagacaccaacctgaacttccagaacctgagcgtgatcggcttcagaatcctgctgctgaaagtggccggctttaacctgctgatgaccctgcggctgtggtccagccgcgccaagagaagcggatctggcgtgaagcagaccctgaatttcgacctgctgaagctggctggcgacgtggaatccaacccaggcccttctagaggccatatgaccgagtacaagcccacggtgcgcctcgccacccgcgacgacgtccccagggccgtacgcaccctcgccgccgcgttcgccgactaccccgccacgcgccacaccgtcgatccggaccgccacatcgagcgggtcaccgagctgcaagaactcttcctcacgcgcgtcgggctcgacatcggcaaggtgtgggtcgcggacgacggcgccgcggtggcggtctggaccacgccggagagcgtcgaagcgggggcggtgttcgccgagatcggcccgcgcatggccgagttgagcggttcccggctggccgcgcagcaacagatggaaggcctcctggcgccgcaccggcccaaggagcccgcgtggttcctggccaccgtcggcgtctcgcccgaccaccagggcaagggtctgggcagcgccgtcgtgctccccggagtggaggcggccgagcgcgccggggtgcccgccttcctggagacctccgcgccccgcaacctccccttctacgagcggctcggcttcaccgtcaccgccgacgtcgaggtgcccgaaggaccgcgcacctggtgcatgacccgcaagcccggtgcctga

SEQ ID NO: 8966 - DNA, 2442 bp, synthetic construct
  source 1..2442: mol_type = other DNA
atggccttaccagtgaccgccttgctcctgccgctggccttgctgctccacgccgccaggccggagatcgtgctgacacagagccctgccaccctgtctctgagccctggcgaaagagccaccctgagctgtagagccagccagagcgtgcggagctacctggcctggtatcagcagaagcctggacaggcccccagactgctgatctacgacgccagcaatcgggccacaggcatccccgccagattttctggctctggcagcggcaccgacttcaccctgacaatcagcagcctggaacccgaggacttcgccgtgtactactgccagcagcggagcaactggccccctacctttggacagggcaccaaggtggaaatcaagctcgagacagtggccgccccatctgtattcatctttcctccatctgatgaacagcttaagtccggcactgcttctgttgtttgcctgcttaacaatttttacccgcgggaagccaaggtgcaatggaaagtggacaacgccctgcagtctggtaacagtcaggaaagcgtgactgaacaggacagcaaagactccacatactccttgagttccaccttgacgctcagtaaggcagactacgagaagcacaaggtttatgcctgtgaagtgactcaccagggcctctctagcccagtgactaagtccttcaaccgcggggagtgtaggaagcgacgggggtcaggcgccactaacttctctctgctgaaacaagccggggacgtggaggagaatccaggtcccactagtatggactggatttggcgcatccttttccttgtcggcgctgctaccggcgcgcattccttcgaacaactccaggtgcaggaatctggccccggactcgtgaagcccagcgagacactgagcctgacctgtaccgtgtccggcggcagcatcagcaacagctacttctcctggggctggatcagacagccccctggcaagggcctggaatggatcggcagcttctactacggcgagaaaacctactacaaccccagcctgaagtccagagccaccatcagcatcgacaccagcaagagccagttctccctgaagctgagcagcgtgacagccgccgacaccgccgtgtattattgccccagaggccccaccatgatccggggcgtgatcgactcttggggccagggaacactcgtgaccgtgtcctctacgcgtgcctctacaaagggaccctccgtgtttcctctggctccctgtagcagaagcaccagcgaatctacagccgctctgggctgcctggtcaaggactactttcctgagcctgtgaccgtgtcctggaacagcggagcactgacatctggcgtgcacacctttccagccgtgctccaaagcagcggcctgtactctctgagcagcgtggtcacagtgcctagctctagcctgggcaccaagacctacacctgtaatgtggaccacaagcctagcaacaccaaggtggacaagcgcgtggaatctaagtacggccctccttgtcctccatgtcctggtaccatccccgaggacacattcttcccaagccccgagagcagctgcgacgtgaagctggtggaaaagagcttcgagacagacaccaacctgaacttccagaacctgagcgtgatcggcttcagaatcctgctgctgaaagtggccggctttaacctgctgatgaccctgcggctgtggtccagccgcgccaagagaagcggatctggcgtgaagcagaccctgaatttcgacctgctgaagctggctggcgacgtggaatccaacccaggcccttctagaggccatatgaccgagtacaagcccacggtgcgcctcgccacccgcgacgacgtccccagggccgtacgcaccctcgccgccgcgttcgccgactaccccgccacgcgccacaccgtcgatccggaccgccacatcgagcgggtcaccgagctgcaagaactcttcctcacgcgcgtcgggctcgacatcggcaaggtgtgggtcgcggacgacggcgccgcggtggcggtctggaccacgccggagagcgtcgaagcgggggcggtgttcgccgagatcggcccgcgcatggccgagttgagcggttcccggctggccgcgcagcaacagatggaaggcctcctggcgccgcaccggcccaaggagcccgcgtggttcctggccaccgtcggcgtctcgcccgaccaccagggcaagggtctgggcagcgccgtcgtgctccccggagtggaggcggccgagcgcgccggggtgcccgccttcctggagacctccgcgccccgcaacctccccttctacgagcggctcggcttcaccgtcaccgccgacgtcgaggtgcccgaaggaccgcgcacctggtgcatgacccgcaagcccggtgcctga

SEQ ID NO: 8967 - DNA, 2451 bp, synthetic construct
  source 1..2451: mol_type = other DNA
atggccttaccagtgaccgccttgctcctgccgctggccttgctgctccacgccgccaggccggagatcgtgctgacacagtctcccgccacactgtcactgtctccaggcgaaagagccacactgagctgtagagccagccagagcgtgtcctcttacctggcctggtatcagcagaagcctggacaggctccccggctgctgatctacgatgccagcaatagagccacaggcatccccgccagattttctggctctggcagcggcaccgatttcaccctgaccataagcagcctggaacctgaggacttcgccgtgtactactgccagcagagaagcgactggcccctgacatttggcggcggaacaaaggtggaaatcaaactcgagacagtggccgccccatctgtattcatctttcctccatctgatgaacagcttaagtccggcactgcttctgttgtttgcctgcttaacaatttttacccgcgggaagccaaggtgcaatggaaagtggacaacgccctgcagtctggtaacagtcaggaaagcgtgactgaacaggacagcaaagactccacatactccttgagttccaccttgacgctcagtaaggcagactacgagaagcacaaggtttatgcctgtgaagtgactcaccagggcctctctagcccagtgactaagtccttcaaccgcggggagtgtaggaagcgacgggggtcaggcgccactaacttctctctgctgaaacaagccggggacgtggaggagaatccaggtcccactagtatggactggatttggcgcatccttttccttgtcggcgctgctaccggcgcgcattccttcgaagtgcaactggttcaatcaggtggcggcctggttcaccctggcggatctctgagactgtcttgtaccggcagcggcttcaccttcagctaccacgccatgcactgggtccgacaggcacctggaaaaggactggaatgggtgtccatcatcggcacaggcggcgtgacctactacgccgattctgtgaagggcagattcaccatcagccgggacaacgtgaagaacagcctgtacctccagatgaactccctgagagccgaggatatggccgtgtattattgcgccagagactactacggcgctggcagcttttacgacggcctgtacggaatggatgtgtggggccagggaaccaccgtgactgtctcttctacgcgtgcctctacaaagggaccctccgtgtttcctctggctccctgtagcagaagcaccagcgaatctacagccgctctgggctgcctggtcaaggactactttcctgagcctgtgaccgtgtcctggaacagcggagcactgacatctggcgtgcacacctttccagccgtgctccaaagcagcggcctgtactctctgagcagcgtggtcacagtgcctagctctagcctgggcaccaagacctacacctgtaatgtggaccacaagcctagcaacaccaaggtggacaagcgcgtggaatctaagtacggccctccttgtcctccatgtcctggtaccatccccgaggacacattcttcccaagccccgagagcagctgcgacgtgaagctggtggaaaagagcttcgagacagacaccaacctgaacttccagaacctgagcgtgatcggcttcagaatcctgctgctgaaagtggccggctttaacctgctgatgaccctgcggctgtggtccagccgcgccaagagaagcggatctggcgtgaagcagaccctgaatttcgacctgctgaagctggctggcgacgtggaatccaacccaggcccttctagaggccatatgaccgagtacaagcccacggtgcgcctcgccacccgcgacgacgtccccagggccgtacgcaccctcgccgccgcgttcgccgactaccccgccacgcgccacaccgtcgatccggaccgccacatcgagcgggtcaccgagctgcaagaactcttcctcacgcgcgtcgggctcgacatcggcaaggtgtgggtcgcggacgacggcgccgcggtggcggtctggaccacgccggagagcgtcgaagcgggggcggtgttcgccgagatcggcccgcgcatggccgagttgagcggttcccggctggccgcgcagcaacagatggaaggcctcctggcgccgcaccggcccaaggagcccgcgtggttcctggccaccgtcggcgtctcgcccgaccaccagggcaagggtctgggcagcgccgtcgtgctccccggagtggaggcggccgagcgcgccggggtgcccgccttcctggagacctccgcgccccgcaacctccccttctacgagcggctcggcttcaccgtcaccgccgacgtcgaggtgcccgaaggaccgcgcacctggtgcatgacccgcaagcccggtgcctga

SEQ ID NO: 8968 - DNA, 2454 bp, synthetic construct
  source 1..2454: mol_type = other DNA
atggccttaccagtgaccgccttgctcctgccgctggccttgctgctccacgccgccaggccggagatcgtgctgacacagtctcccgccacactgtcactgtctccaggcgaaagagccacactgagctgtagagccagccagagcgtgtcctcttacctggcctggtatcagcagaagcctggacaggctccccggctgctgatctacgatgccagcaatagagccacaggcatccccgccagattttctggctctggcagcggcaccgatttcaccctgaccataagcagcctggaacctgaggacttcgccgtgtactactgccagcagagaagcaactggcccctgacctttggacagggcaccaaggtggaaatcaagagactcgagacagtggccgccccatctgtattcatctttcctccatctgatgaacagcttaagtccggcactgcttctgttgtttgcctgcttaacaatttttacccgcgggaagccaaggtgcaatggaaagtggacaacgccctgcagtctggtaacagtcaggaaagcgtgactgaacaggacagcaaagactccacatactccttgagttccaccttgacgctcagtaaggcagactacgagaagcacaaggtttatgcctgtgaagtgactcaccagggcctctctagcccagtgactaagtccttcaaccgcggggagtgtaggaagcgacgggggtcaggcgccactaacttctctctgctgaaacaagccggggacgtggaggagaatccaggtcccactagtatggactggatttggcgcatccttttccttgtcggcgctgctaccggcgcgcattccttcgaagtgcaactggttcaatcaggtggcggcctggttcaccctggcggatctctgagactgtcttgtaccggcagcggcttcaccttcagctaccacgccatgcactgggtccgacaggcacctggaaaaggactggaatgggtgtccatcatcggcacaggcggcgtgacctactacgccgattctgtgaagggcagattcaccatcagccgggacaacgtgaagaacagcctgtacctccagatgaactccctgagagccgaggatatggccgtgtattattgcgccagagactactacggcgctggcagcttttacgacggcctgtacggaatggatgtgtggggccagggaaccaccgtgactgtctcttctacgcgtgcctctacaaagggaccctccgtgtttcctctggctccctgtagcagaagcaccagcgaatctacagccgctctgggctgcctggtcaaggactactttcctgagcctgtgaccgtgtcctggaacagcggagcactgacatctggcgtgcacacctttccagccgtgctccaaagcagcggcctgtactctctgagcagcgtggtcacagtgcctagctctagcctgggcaccaagacctacacctgtaatgtggaccacaagcctagcaacaccaaggtggacaagcgcgtggaatctaagtacggccctccttgtcctccatgtcctggtaccatccccgaggacacattcttcccaagccccgagagcagctgcgacgtgaagctggtggaaaagagcttcgagacagacaccaacctgaacttccagaacctgagcgtgatcggcttcagaatcctgctgctgaaagtggccggctttaacctgctgatgaccctgcggctgtggtccagccgcgccaagagaagcggatctggcgtgaagcagaccctgaatttcgacctgctgaagctggctggcgacgtggaatccaacccaggcccttctagaggccatatgaccgagtacaagcccacggtgcgcctcgccacccgcgacgacgtccccagggccgtacgcaccctcgccgccgcgttcgccgactaccccgccacgcgccacaccgtcgatccggaccgccacatcgagcgggtcaccgagctgcaagaactcttcctcacgcgcgtcgggctcgacatcggcaaggtgtgggtcgcggacgacggcgccgcggtggcggtctggaccacgccggagagcgtcgaagcgggggcggtgttcgccgagatcggcccgcgcatggccgagttgagcggttcccggctggccgcgcagcaacagatggaaggcctcctggcgccgcaccggcccaaggagcccgcgtggttcctggccaccgtcggcgtctcgcccgaccaccagggcaagggtctgggcagcgccgtcgtgctccccggagtggaggcggccgagcgcgccggggtgcccgccttcctggagacctccgcgccccgcaacctccccttctacgagcggctcggcttcaccgtcaccgccgacgtcgaggtgcccgaaggaccgcgcacctggtgcatgacccgcaagcccggtgcctga

SEQ ID NO: 8969 - DNA, 2454 bp, synthetic construct
  source 1..2454: mol_type = other DNA
atggccttaccagtgaccgccttgctcctgccgctggccttgctgctccacgccgccaggccggacgagatcgtgctgacacagagccctgccaccctgtctctgagccctggcgaaagagccaccctgagctgtagagccagccagagcgtgtccagctacctggcctggtatcagcagaagcccggccaggctccccggctgctgatctacgatgccagcaatagagccaccggcatccccgccagattttccggctctggcagcggcaccgacttcaccctgaccatcagctccctggaacccgaggacttcgccgtgtactactgccagcagcggagcaactggcccatcacattcggccagggcacccggctggaaatcaaactcgagacagtggccgccccatctgtattcatctttcctccatctgatgaacagcttaagtccggcactgcttctgttgtttgcctgcttaacaatttttacccgcgggaagccaaggtgcaatggaaagtggacaacgccctgcagtctggtaacagtcaggaaagcgtgactgaacaggacagcaaagactccacatactccttgagttccaccttgacgctcagtaaggcagactacgagaagcacaaggtttatgcctgtgaagtgactcaccagggcctctctagcccagtgactaagtccttcaaccgcggggagtgtaggaagcgacgggggtcaggcgccactaacttctctctgctgaaacaagccggggacgtggaggagaatccaggtcccactagtatggactggatttggcgcatccttttccttgtcggcgctgctaccggcgcgcattccttcgaagtgcaactggttcaatcaggtggcggcctggttcaccctggcggatctctgagactgtcttgtaccggcagcggcttcaccttcagctaccacgccatgcactgggtccgacaggcacctggaaaaggactggaatgggtgtccatcatcggcacaggcggcgtgacctactacgccgattctgtgaagggcagattcaccatcagccgggacaacgtgaagaacagcctgtacctccagatgaactccctgagagccgaggatatggccgtgtattattgcgccagagactactacggcgctggcagcttttacgacggcctgtacggaatggatgtgtggggccagggaaccaccgtgactgtctcttctacgcgtgcctctacaaagggaccctccgtgtttcctctggctccctgtagcagaagcaccagcgaatctacagccgctctgggctgcctggtcaaggactactttcctgagcctgtgaccgtgtcctggaacagcggagcactgacatctggcgtgcacacctttccagccgtgctccaaagcagcggcctgtactctctgagcagcgtggtcacagtgcctagctctagcctgggcaccaagacctacacctgtaatgtggaccacaagcctagcaacaccaaggtggacaagcgcgtggaatctaagtacggccctccttgtcctccatgtcctggtaccatccccgaggacacattcttcccaagccccgagagcagctgcgacgtgaagctggtggaaaagagcttcgagacagacaccaacctgaacttccagaacctgagcgtgatcggcttcagaatcctgctgctgaaagtggccggctttaacctgctgatgaccctgcggctgtggtccagccgcgccaagagaagcggatctggcgtgaagcagaccctgaatttcgacctgctgaagctggctggcgacgtggaatccaacccaggcccttctagaggccatatgaccgagtacaagcccacggtgcgcctcgccacccgcgacgacgtccccagggccgtacgcaccctcgccgccgcgttcgccgactaccccgccacgcgccacaccgtcgatccggaccgccacatcgagcgggtcaccgagctgcaagaactcttcctcacgcgcgtcgggctcgacatcggcaaggtgtgggtcgcggacgacggcgccgcggtggcggtctggaccacgccggagagcgtcgaagcgggggcggtgttcgccgagatcggcccgcgcatggccgagttgagcggttcccggctggccgcgcagcaacagatggaaggcctcctggcgccgcaccggcccaaggagcccgcgtggttcctggccaccgtcggcgtctcgcccgaccaccagggcaagggtctgggcagcgccgtcgtgctccccggagtggaggcggccgagcgcgccggggtgcccgccttcctggagacctccgcgccccgcaacctccccttctacgagcggctcggcttcaccgtcaccgccgacgtcgaggtgcccgaaggaccgcgcacctggtgcatgacccgcaagcccggtgcctga

SEQ ID NO: 8970 - DNA, 3060 bp, synthetic construct
  source 1..3060: mol_type = other DNA
atggccttaccagtgaccgccttgctcctgccgctggccttgctgctccacgccgccaggccgcaagttcagctggtggaaagcggtggtggcgttgtgcaacctggtagaagtctgaggcttagctgcgccgccagcttttctggatacggcgtgtcaacaatgggatggtttaggcaggctccaggcaagggccttgaaggcgtggccgctatcacagtcggctccggcaatacctactacgccgatagcgtgagaggcaggttcacaatctccagagacaacagcaagaatacggtgtacctgcaaatgaacagcctccgcgccgaggatacagccatgtattactgtgccgtgggctacctgtctggcggctcttgggatgtgcccggcagatacaattactggggacagggaaccctggttaccgtgtctagtctcgagacagtggccgccccatctgtattcatctttcctccatctgatgaacagcttaagtccggcactgcttctgttgtttgcctgcttaacaatttttacccgcgggaagccaaggtgcaatggaaagtggacaacgccctgcagtctggtaacagtcaggaaagcgtgactgaacaggacagcaaagactccacatactccttgagttccaccttgacgctcagtaaggcagactacgagaagcacaaggtttatgcctgtgaagtgactcaccagggcctctctagcccagtgactaagtccttcaaccgcggggagtgtaggaagcgacgggggtcaggcgccactaacttctctctgctgaaacaagccggggacgtggaggagaatccaggtcccactagtatggactggatttggcgcatccttttccttgtcggcgctgctaccggcgcgcattccttcgaagtgcaactggttgaatccggtggcggcctggtgcaagcaggcggatctctcagacttagctgtgccgcctccggcagaaccttcacaatgggatggtttaggcaggctccagggaaagagagagagttcgtcgccgccatctctctgtctcccacactggcctactacgccgactctgtgaaaggccggttcaccatctccagagataatgccaagaacaccgtggtgctgcaaatgaactctctgaaacccgaggatacagccctgtactattgtgccgctgaccggaagtccgtgatgagcatcagacccgattactggggacagggcacacaagtcacagtgtcctctacgcgtgcctctacaaagggaccctccgtgtttcctctggctccctgtagcagaagcaccagcgaatctacagccgctctgggctgcctggtcaaggactactttcctgagcctgtgaccgtgtcctggaacagcggagcactgacatctggcgtgcacacctttccagccgtgctccaaagcagcggcctgtactctctgagcagcgtggtcacagtgcctagctctagcctgggcaccaagacctacacctgtaatgtggaccacaagcctagcaacaccaaggtggacaagcgcgtggaatctaagtacggccctccttgtcctccatgtcctggtaccggcggaggcggatctggcggcggaggtagcggtggcggaggatctgaattcggcatgcggactgaagacctcccaaaggctgtggtgttcctggagcctcaatggtacagggtgctggagaaggacagtgtgactctgaagtgccagggagcctactcccctgaggacaattccacacagtggtttcacaatgagagcctcatctcaagccaggcctccagctacttcattgacgctgccacagtggacgacagtggagagtacaggtgccagacaaacctctccaccctcagtgacccggtgcagctagaagtccatatcggctggctgttgctccaggcccctcggtgggtgttcaaggaggaagaccctattcacctgaggtgtcacagctggaagaacactgctctgcataaggtcacatatttacagaatggcaaaggcaggaagtattttcatcataattctgacttctacattccaaaagccacactcaaagacagcggctcctacttctgcagggggcttgttgggagtaaaaatgtgtcttcagagactgtgaacatcaccatcactcaaggtttggcagtgtcaaccatctcatcattctttccacctggctaccaagtgtccttctgcctggtcatggtgctgctgttcgccgtggataccggcctgtacttcagcgtcaagaccaacatccggtccagcaccagagactggaaggaccacaagttcaagtggcggaaggaccctcaggacaagagggccaagcgatctggatctggagcaacaaacttctcactactcaaacaagcaggtgacgtggaggagaatcccgggcctactagaggccatatgaccgagtacaagcccacggtgcgccccgccacccgcgacgacgtccccagggccgtacgcaccctcgccgccgcgttcgccgactaccccgccacgcgccacaccgtcgatccggaccgccacatcgagcgggtcaccgagctgcaagaactcttcctcacgcgcgtcgggctcgacatcggcaaggtgtgggtcgcggacgacggcgccgcggtggcggtctggaccacgccggagagcgtcgaagcgggggcggtgttcgccgagatcggcccgcgcatggccgagttgagcggttcccggctggccgcgcagcaacagatggaaggcctcctggcgccgcaccggcccaaggagcccgcgtggttcctggccaccgtcggcgtctcgcccgaccaccagggcaagggtctgggcagcgccgtcgtgctccccggagtggaggcggccgagcgcgccggggtgcccgccttcctggagacctccgcgccccgcaacctccccttctacgagcggctcggcttcaccgtcaccgccgacgtcgaggtgcccgaaggaccgcgcacctggtgcatgacccgcaagcccggtgcctga

SEQ ID NO: 8971 - DNA, 3060 bp, synthetic construct
  source 1..3060: mol_type = other DNA
atggccttaccagtgaccgccttgctcctgccgctggccttgctgctccacgccgccaggccgcaggtgcagctggttgaatctggcggaggactggttcagcctggcggatctctgagactgtcttgtgccgccagcggcagcatcaacagcagatcctgcatgggctggttcagacaggcccctggcaagggaagagaaggcgtggcagctatcggacaagtgaccggcagaacctactacgtggacagcgtgaagggcagattcaccatcagcctggacaacagcaagaacaccctgtacctccagatgaacagcctgagagccgaggacaccgccgtgtactattgtgctgctgcccctggctgtctgctgtctgcacttagaagcgccgactacagaaactggggccagggcacactggtcaccgtttcttctctcgagacagtggccgccccatctgtattcatctttcctccatctgatgaacagcttaagtccggcactgcttctgttgtttgcctgcttaacaatttttacccgcgggaagccaaggtgcaatggaaagtggacaacgccctgcagtctggtaacagtcaggaaagcgtgactgaacaggacagcaaagactccacatactccttgagttccaccttgacgctcagtaaggcagactacgagaagcacaaggtttatgcctgtgaagtgactcaccagggcctctctagcccagtgactaagtccttcaaccgcggggagtgtaggaagcgacgggggtcaggcgccactaacttctctctgctgaaacaagccggggacgtggaggagaatccaggtcccactagtatggactggatttggcgcatccttttccttgtcggcgctgctaccggcgcgcattccttcgaagtgcaactggttgaatccggtggcggcctggtgcaagcaggcggatctctcagacttagctgtgccgcctccggcagaaccttcacaatgggatggtttaggcaggctccagggaaagagagagagttcgtcgccgccatctctctgtctcccacactggcctactacgccgactctgtgaaaggccggttcaccatctccagagataatgccaagaacaccgtggtgctgcaaatgaactctctgaaacccgaggatacagccctgtactattgtgccgctgaccggaagtccgtgatgagcatcagacccgattactggggacagggcacacaagtcacagtgtcctctacgcgtgcctctacaaagggaccctccgtgtttcctctggctccctgtagcagaagcaccagcgaatctacagccgctctgggctgcctggtcaaggactactttcctgagcctgtgaccgtgtcctggaacagcggagcactgacatctggcgtgcacacctttccagccgtgctccaaagcagcggcctgtactctctgagcagcgtggtcacagtgcctagctctagcctgggcaccaagacctacacctgtaatgtggaccacaagcctagcaacaccaaggtggacaagcgcgtggaatctaagtacggccctccttgtcctccatgtcctggtaccggcggaggcggatctggcggcggaggtagcggtggcggaggatctgaattcggcatgcggactgaagacctcccaaaggctgtggtgttcctggagcctcaatggtacagggtgctggagaaggacagtgtgactctgaagtgccagggagcctactcccctgaggacaattccacacagtggtttcacaatgagagcctcatctcaagccaggcctccagctacttcattgacgctgccacagtggacgacagtggagagtacaggtgccagacaaacctctccaccctcagtgacccggtgcagctagaagtccatatcggctggctgttgctccaggcccctcggtgggtgttcaaggaggaagaccctattcacctgaggtgtcacagctggaagaacactgctctgcataaggtcacatatttacagaatggcaaaggcaggaagtattttcatcataattctgacttctacattccaaaagccacactcaaagacagcggctcctacttctgcagggggcttgttgggagtaaaaatgtgtcttcagagactgtgaacatcaccatcactcaaggtttggcagtgtcaaccatctcatcattctttccacctggctaccaagtgtccttctgcctggtcatggtgctgctgttcgccgtggataccggcctgtacttcagcgtcaagaccaacatccggtccagcaccagagactggaaggaccacaagttcaagtggcggaaggaccctcaggacaagagggccaagcgatctggatctggagcaacaaacttctcactactcaaacaagcaggtgacgtggaggagaatcccgggcctactagaggccatatgaccgagtacaagcccacggtgcgccccgccacccgcgacgacgtccccagggccgtacgcaccctcgccgccgcgttcgccgactaccccgccacgcgccacaccgtcgatccggaccgccacatcgagcgggtcaccgagctgcaagaactcttcctcacgcgcgtcgggctcgacatcggcaaggtgtgggtcgcggacgacggcgccgcggtggcggtctggaccacgccggagagcgtcgaagcgggggcggtgttcgccgagatcggcccgcgcatggccgagttgagcggttcccggctggccgcgcagcaacagatggaaggcctcctggcgccgcaccggcccaaggagcccgcgtggttcctggccaccgtcggcgtctcgcccgaccaccagggcaagggtctgggcagcgccgtcgtgctccccggagtggaggcggccgagcgcgccggggtgcccgccttcctggagacctccgcgccccgcaacctccccttctacgagcggctcggcttcaccgtcaccgccgacgtcgaggtgcccgaaggaccgcgcacctggtgcatgacccgcaagcccggtgcctga

SEQ ID NO: 8972 - DNA, 2685 bp, synthetic construct
  source 1..2685: mol_type = other DNA
atggccttaccagtgaccgccttgctcctgccgctggccttgctgctccacgccgccaggccgcagatcgtgctgacacagagccctgccatcatgtccgcttctcccggcgagaaagtgaccatgacatgtagcgccagcagcagcgtgtccttcatgcactggtatcagcagaagtccggcacaagccccaagcggtggatctacgataccagcacactggcctctggcgtgccagccagatttggcggatctggcagcggcacatcttacagcctgaccatcagcagcatggaagccgaagatgccgccacctactactgccagcagtggtccagcaatcccctgacatttggagccggcaccaagctggaactgaagagactcgagacagtggccgccccatctgtattcatctttcctccatctgatgaacagcttaagtccggcactgcttctgttgtttgcctgcttaacaatttttacccgcgggaagccaaggtgcaatggaaagtggacaacgccctgcagtctggtaacagtcaggaaagcgtgactgaacaggacagcaaagactccacatactccttgagttccaccttgacgctcagtaaggcagactacgagaagcacaaggtttatgcctgtgaagtgactcaccagggcctctctagcccagtgactaagtccttcaaccgcggggagtgttctggcggagctagaagcgaagatcggtatcggaaccccaagagggccaagcgatctggatctggagcaacaaacttctcactactcaaacaagcaggtgacgtggaggagaatcccgggcctactagtatggactggatttggcgcatccttttccttgtcggcgctgctaccggcgcgcattccttcgaacaagttcagctgcaacagagcggccctgagctggttaagcctggcgcttctgtgcggatctcttgcaaggccagcggctacaccttcaccagctactacatccactgggtcaagcagcggcctggacagggactcgaatggatcggctggatctaccccggcaacctgaacaccaagtacaacgagaagttcaagggcaaagccacactgaccgccgacaagagcagcagcacagcctacatgcagctgagcagcctgacaagcgaggacagcgccgtgtacttctgcgccagatacgactggtacttcgacgtgtggggagccggaaccaccgtgacagtttcttctacgcgtgcctctacaaagggaccctccgtgtttcctctggctccctgtagcagaagcaccagcgaatctacagccgctctgggctgcctggtcaaggactactttcctgagcctgtgaccgtgtcctggaacagcggagcactgacatctggcgtgcacacctttccagccgtgctccaaagcagcggcctgtactctctgagcagcgtggtcacagtgcctagctctagcctgggcaccaagacctacacctgtaatgtggaccacaagcctagcaacaccaaggtggacaagcgcgtgggtacccagagttttgggttgttggaccctaaattgtgctatctgttggacggaatcctgttcatttacggagtgatcctgaccgcattgttcctgcgggttaagttttccagatccgcagacgcacccgcttaccaacaagggcagaaccaactctacaatgaacttaatttggggcggagggaagagtacgacgttctggacaaaaggaggggacgagatcccgagatgggcggaaagcctcagcgaaggaagaatccgcaagaggggctttataacgaactccagaaagataaaatggcagaagcctatagtgagattgggatgaagggagaaaggaggaggggtaaaggtcacgatgggttgtaccaaggattgagcacagccactaaagatacctatgatgcgctccacatgcaggccctgccgccaagacgcgccaagagaagcggatctggcgtgaagcagaccctgaatttcgacctgctgaagctggctggcgacgtggaatccaacccaggcccttctagaggccatatgaccgagtacaagcccacggtgcgcctcgccacccgcgacgacgtccccagggccgtacgcaccctcgccgccgcgttcgccgactaccccgccacgcgccacaccgtcgatccggaccgccacatcgagcgggtcaccgagctgcaagaactcttcctcacgcgcgtcgggctcgacatcggcaaggtgtgggtcgcggacgacggcgccgcggtggcggtctggaccacgccggagagcgtcgaagcgggggcggtgttcgccgagatcggcccgcgcatggccgagttgagcggttcccggctggccgcgcagcaacagatggaaggcctcctggcgccgcaccggcccaaggagcccgcgtggttcctggccaccgtcggcgtctcgcccgaccaccagggcaagggtctgggcagcgccgtcgtgctccccggagtggaggcggccgagcgcgccggggtgcccgccttcctggagacctccgcgccccgcaacctccccttctacgagcggctcggcttcaccgtcaccgccgacgtcgaggtgcccgaaggaccgcgcacctggtgcatgacccgcaagcccggtgcctga

SEQ ID NO: 8973 - DNA, 2706 bp, synthetic construct
  source 1..2706: mol_type = other DNA
atggccttaccagtgaccgccttgctcctgccgctggccttgctgctccacgccgccaggccgcagatcgtgctgacacagagccctgccatcatgtccgcttctcccggcgagaaagtgaccatgacatgtagcgccagcagcagcgtgtccttcatgcactggtatcagcagaagtccggcacaagccccaagcggtggatctacgataccagcacactggcctctggcgtgccagccagatttggcggatctggcagcggcacatcttacagcctgaccatcagcagcatggaagccgaagatgccgccacctactactgccagcagtggtccagcaatcccctgacatttggagccggcaccaagctggaactgaagagactcgagacagtggccgccccatctgtattcatctttcctccatctgatgaacagcttaagtccggcactgcttctgttgtttgcctgcttaacaatttttacccgcgggaagccaaggtgcaatggaaagtggacaacgccctgcagtctggtaacagtcaggaaagcgtgactgaacaggacagcaaagactccacatactccttgagttccaccttgacgctcagtaaggcagactacgagaagcacaaggtttatgcctgtgaagtgactcaccagggcctctctagcccagtgactaagtccttcaaccgcggggagtgttctggcggagctagaagcgaagatcggtatcggaaccccaagagggccaagcgatctggatctggagcaacaaacttctcactactcaaacaagcaggtgacgtggaggagaatcccgggcctactagtatggactggatttggcgcatccttttccttgtcggcgctgctaccggcgcgcattccttcgaacaagttcagctgcaacagagcggccctgagctggttaagcctggcgcttctgtgcggatctcttgcaaggccagcggctacaccttcaccagctactacatccactgggtcaagcagcggcctggacagggactcgaatggatcggctggatctaccccggcaacctgaacaccaagtacaacgagaagttcaagggcaaagccacactgaccgccgacaagagcagcagcacagcctacatgcagctgagcagcctgacaagcgaggacagcgccgtgtacttctgcgccagatacgactggtacttcgacgtgtggggagccggaaccaccgtgacagtttcttctacgcgtgcctctacaaagggaccctccgtgtttcctctggctccctgtagcagaagcaccagcgaatctacagccgctctgggctgcctggtcaaggactactttcctgagcctgtgaccgtgtcctggaacagcggagcactgacatctggcgtgcacacctttccagccgtgctccaaagcagcggcctgtactctctgagcagcgtggtcacagtgcctagctctagcctgggcaccaagacctacacctgtaatgtggaccacaagcctagcaacaccaaggtggacaagcgcgtggaatctaagtacggccctcctggtacccagagttttgggttgttggaccctaaattgtgctatctgttggacggaatcctgttcatttacggagtgatcctgaccgcattgttcctgcgggttaagttttccagatccgcagacgcacccgcttaccaacaagggcagaaccaactctacaatgaacttaatttggggcggagggaagagtacgacgttctggacaaaaggaggggacgagatcccgagatgggcggaaagcctcagcgaaggaagaatccgcaagaggggctttataacgaactccagaaagataaaatggcagaagcctatagtgagattgggatgaagggagaaaggaggaggggtaaaggtcacgatgggttgtaccaaggattgagcacagccactaaagatacctatgatgcgctccacatgcaggccctgccgccaagacgcgccaagagaagcggatctggcgtgaagcagaccctgaatttcgacctgctgaagctggctggcgacgtggaatccaacccaggcccttctagaggccatatgaccgagtacaagcccacggtgcgcctcgccacccgcgacgacgtccccagggccgtacgcaccctcgccgccgcgttcgccgactaccccgccacgcgccacaccgtcgatccggaccgccacatcgagcgggtcaccgagctgcaagaactcttcctcacgcgcgtcgggctcgacatcggcaaggtgtgggtcgcggacgacggcgccgcggtggcggtctggaccacgccggagagcgtcgaagcgggggcggtgttcgccgagatcggcccgcgcatggccgagttgagcggttcccggctggccgcgcagcaacagatggaaggcctcctggcgccgcaccggcccaaggagcccgcgtggttcctggccaccgtcggcgtctcgcccgaccaccagggcaagggtctgggcagcgccgtcgtgctccccggagtggaggcggccgagcgcgccggggtgcccgccttcctggagacctccgcgccccgcaacctccccttctacgagcggctcggcttcaccgtcaccgccgacgtcgaggtgcccgaaggaccgcgcacctggtgcatgacccgcaagcccggtgcctga

SEQ ID NO: 8974 - DNA, 2721 bp, synthetic construct
  source 1..2721: mol_type = other DNA
atggccttaccagtgaccgccttgctcctgccgctggccttgctgctccacgccgccaggccgcagatcgtgctgacacagagccctgccatcatgtccgcttctcccggcgagaaagtgaccatgacatgtagcgccagcagcagcgtgtccttcatgcactggtatcagcagaagtccggcacaagccccaagcggtggatctacgataccagcacactggcctctggcgtgccagccagatttggcggatctggcagcggcacatcttacagcctgaccatcagcagcatggaagccgaagatgccgccacctactactgccagcagtggtccagcaatcccctgacatttggagccggcaccaagctggaactgaagagactcgagacagtggccgccccatctgtattcatctttcctccatctgatgaacagcttaagtccggcactgcttctgttgtttgcctgcttaacaatttttacccgcgggaagccaaggtgcaatggaaagtggacaacgccctgcagtctggtaacagtcaggaaagcgtgactgaacaggacagcaaagactccacatactccttgagttccaccttgacgctcagtaaggcagactacgagaagcacaaggtttatgcctgtgaagtgactcaccagggcctctctagcccagtgactaagtccttcaaccgcggggagtgttctggcggagctagaagcgaagatcggtatcggaaccccaagagggccaagcgatctggatctggagcaacaaacttctcactactcaaacaagcaggtgacgtggaggagaatcccgggcctactagtatggactggatttggcgcatccttttccttgtcggcgctgctaccggcgcgcattccttcgaacaagttcagctgcaacagagcggccctgagctggttaagcctggcgcttctgtgcggatctcttgcaaggccagcggctacaccttcaccagctactacatccactgggtcaagcagcggcctggacagggactcgaatggatcggctggatctaccccggcaacctgaacaccaagtacaacgagaagttcaagggcaaagccacactgaccgccgacaagagcagcagcacagcctacatgcagctgagcagcctgacaagcgaggacagcgccgtgtacttctgcgccagatacgactggtacttcgacgtgtggggagccggaaccaccgtgacagtttcttctacgcgtgcctctacaaagggaccctccgtgtttcctctggctccctgtagcagaagcaccagcgaatctacagccgctctgggctgcctggtcaaggactactttcctgagcctgtgaccgtgtcctggaacagcggagcactgacatctggcgtgcacacctttccagccgtgctccaaagcagcggcctgtactctctgagcagcgtggtcacagtgcctagctctagcctgggcaccaagacctacacctgtaatgtggaccacaagcctagcaacaccaaggtggacaagcgcgtggaatctaagtacggccctcctggacctccaggacctggtacccagagttttgggttgttggaccctaaattgtgctatctgttggacggaatcctgttcatttacggagtgatcctgaccgcattgttcctgcgggttaagttttccagatccgcagacgcacccgcttaccaacaagggcagaaccaactctacaatgaacttaatttggggcggagggaagagtacgacgttctggacaaaaggaggggacgagatcccgagatgggcggaaagcctcagcgaaggaagaatccgcaagaggggctttataacgaactccagaaagataaaatggcagaagcctatagtgagattgggatgaagggagaaaggaggaggggtaaaggtcacgatgggttgtaccaaggattgagcacagccactaaagatacctatgatgcgctccacatgcaggccctgccgccaagacgcgccaagagaagcggatctggcgtgaagcagaccctgaatttcgacctgctgaagctggctggcgacgtggaatccaacccaggcccttctagaggccatatgaccgagtacaagcccacggtgcgcctcgccacccgcgacgacgtccccagggccgtacgcaccctcgccgccgcgttcgccgactaccccgccacgcgccacaccgtcgatccggaccgccacatcgagcgggtcaccgagctgcaagaactcttcctcacgcgcgtcgggctcgacatcggcaaggtgtgggtcgcggacgacggcgccgcggtggcggtctggaccacgccggagagcgtcgaagcgggggcggtgttcgccgagatcggcccgcgcatggccgagttgagcggttcccggctggccgcgcagcaacagatggaaggcctcctggcgccgcaccggcccaaggagcccgcgtggttcctggccaccgtcggcgtctcgcccgaccaccagggcaagggtctgggcagcgccgtcgtgctccccggagtggaggcggccgagcgcgccggggtgcccgccttcctggagacctccgcgccccgcaacctccccttctacgagcggctcggcttcaccgtcaccgccgacgtcgaggtgcccgaaggaccgcgcacctggtgcatgacccgcaagcccggtgcctga

SEQ ID NO: 8975 - DNA, 2682 bp, synthetic construct
  source 1..2682: mol_type = other DNA
atggccttaccagtgaccgccttgctcctgccgctggccttgctgctccacgccgccaggccggacgtggtcatgacacagagcccttctagcctgtctgccagcgtgggcgacagagtgaccatcacctgtatggcctccgaggacatctacatccggctggcctggtatcagcagaagcctggaaacgcccctaagctgctgatctacgccgccacctctctggaaacaggcgtgccaagcagattttccggcagcggctctggcaccgatttcaccctgacaatatccagcctccagcctgaggacttcgccacctactactgccagcagtattggagcagcccctggacatttggcggaggcaccaaggtggaaatcaaactcgagacagtggccgccccatctgtattcatctttcctccatctgatgaacagcttaagtccggcactgcttctgttgtttgcctgcttaacaatttttacccgcgggaagccaaggtgcaatggaaagtggacaacgccctgcagtctggtaacagtcaggaaagcgtgactgaacaggacagcaaagactccacatactccttgagttccaccttgacgctcagtaaggcagactacgagaagcacaaggtttatgcctgtgaagtgactcaccagggcctctctagcccagtgactaagtccttcaaccgcggggagtgtaggaagcgacgggggtcaggcgccactaacttctctctgctgaaacaagccggggacgtggaggagaatccaggtcccactagtatggactggatttggcgcatccttttccttgtcggcgctgctaccggcgcgcattccttcgaacaggttcagctgcaagagtctggccccggactggtcaagcctagccaaacactgagcctgacctgtaccgtgtccggctacagcatcaccagcgactacacctggaactggatcagacagcctcctggcaacggactggaatggatcggctacatcacctacagcggcagcaccagctacaaccccagcctgaaaagccgggtgctgatctccgtggacaccagcaagaatcaggtgtccctgaagctgagcagcgtgacagccgctgataccgccgtgtactactgtgccagactggggagaagatacacaatggactactggggccagggcaccaccgtgacagtttcttctacgcgtgcctctacaaagggaccctccgtgtttcctctggctccctgtagcagaagcaccagcgaatctacagccgctctgggctgcctggtcaaggactactttcctgagcctgtgaccgtgtcctggaacagcggagcactgacatctggcgtgcacacctttccagccgtgctccaaagcagcggcctgtactctctgagcagcgtggtcacagtgcctagctctagcctgggcaccaagacctacacctgtaatgtggaccacaagcctagcaacaccaaggtggacaagcgcgtggaatctaagtacggccctcctggacctccaggacctggtacccagagttttgggttgttggaccctaaattgtgctatctgttggacggaatcctgttcatttacggagtgatcctgaccgcattgttcctgcgggttaagttttccagatccgcagacgcacccgcttaccaacaagggcagaaccaactctacaatgaacttaatttggggcggagggaagagtacgacgttctggacaaaaggaggggacgagatcccgagatgggcggaaagcctcagcgaaggaagaatccgcaagaggggctttataacgaactccagaaagataaaatggcagaagcctatagtgagattgggatgaagggagaaaggaggaggggtaaaggtcacgatgggttgtaccaaggattgagcacagccactaaagatacctatgatgcgctccacatgcaggccctgccgccaagacgcgccaagagaagcggatctggcgtgaagcagaccctgaatttcgacctgctgaagctggctggcgacgtggaatccaacccaggcccttctagaggccatatgaccgagtacaagcccacggtgcgcctcgccacccgcgacgacgtccccagggccgtacgcaccctcgccgccgcgttcgccgactaccccgccacgcgccacaccgtcgatccggaccgccacatcgagcgggtcaccgagctgcaagaactcttcctcacgcgcgtcgggctcgacatcggcaaggtgtgggtcgcggacgacggcgccgcggtggcggtctggaccacgccggagagcgtcgaagcgggggcggtgttcgccgagatcggcccgcgcatggccgagttgagcggttcccggctggccgcgcagcaacagatggaaggcctcctggcgccgcaccggcccaaggagcccgcgtggttcctggccaccgtcggcgtctcgcccgaccaccagggcaagggtctgggcagcgccgtcgtgctccccggagtggaggcggccgagcgcgccggggtgcccgccttcctggagacctccgcgccccgcaacctccccttctacgagcggctcggcttcaccgtcaccgccgacgtcgaggtgcccgaaggaccgcgcacctggtgcatgacccgcaagcccggtgcctga

SEQ ID NO: 8976 - DNA, 2685 bp, synthetic construct
  source 1..2685: mol_type = other DNA
atggccttaccagtgaccgccttgctcctgccgctggccttgctgctccacgccgccaggccggacgacatccagatgacccagagcagcagcagcttcagcgtgagcctgggcgacagagtgaccatcacctgcatggccagcgaggacatctacatcagactggcctggtaccagcagaagcccggcaacgcccccagactgctgatcagcgccgccaccagcctggagaccggcgtgcccagcagattcagcggcagcggcagcggcaaggactacaccctgagcatcaccagcctgcagaccgaggacgtgggcacctactactgccagcagtactggagcagcccctggaccttcggcggcggcaccaagctggagatcaacctcgagacagtggccgccccatctgtattcatctttcctccatctgatgaacagcttaagtccggcactgcttctgttgtttgcctgcttaacaatttttacccgcgggaagccaaggtgcaatggaaagtggacaacgccctgcagtctggtaacagtcaggaaagcgtgactgaacaggacagcaaagactccacatactccttgagttccaccttgacgctcagtaaggcagactacgagaagcacaaggtttatgcctgtgaagtgactcaccagggcctctctagcccagtgactaagtccttcaaccgcggggagtgtaggaagcgacgggggtcaggcgccactaacttctctctgctgaaacaagccggggacgtggaggagaatccaggtcccactagtatggactggatttggcgcatccttttccttgtcggcgctgctaccggcgcgcattccttcgaagacgtgcagctgcaggagagcggccccggcctggtgaagcccagccagagcctgagcctgacctgcaccgtgaccggctacagcatcaccagcgactacacctggaactggatcagacagttccccggcaacaagctggagtggatgggctacatcacctacagcggcagcaccagctacaaccccagcctgaagagcagaaacagcatcaccagagacaccagcaagaaccagttcttcctgcagctgaacagcgtgaccaccgaggacaccgccacctactactgcgccagactgggcagaagatacacaatggactactggggccagggcaccagcgtgaccgtgagcagcacgcgtgcctctacaaagggaccctccgtgtttcctctggctccctgtagcagaagcaccagcgaatctacagccgctctgggctgcctggtcaaggactactttcctgagcctgtgaccgtgtcctggaacagcggagcactgacatctggcgtgcacacctttccagccgtgctccaaagcagcggcctgtactctctgagcagcgtggtcacagtgcctagctctagcctgggcaccaagacctacacctgtaatgtggaccacaagcctagcaacaccaaggtggacaagcgcgtggaatctaagtacggccctcctggacctccaggacctggtacccagagttttgggttgttggaccctaaattgtgctatctgttggacggaatcctgttcatttacggagtgatcctgaccgcattgttcctgcgggttaagttttccagatccgcagacgcacccgcttaccaacaagggcagaaccaactctacaatgaacttaatttggggcggagggaagagtacgacgttctggacaaaaggaggggacgagatcccgagatgggcggaaagcctcagcgaaggaagaatccgcaagaggggctttataacgaactccagaaagataaaatggcagaagcctatagtgagattgggatgaagggagaaaggaggaggggtaaaggtcacgatgggttgtaccaaggattgagcacagccactaaagatacctatgatgcgctccacatgcaggccctgccgccaagacgcgccaagagaagcggatctggcgtgaagcagaccctgaatttcgacctgctgaagctggctggcgacgtggaatccaacccaggcccttctagaggccatatgaccgagtacaagcccacggtgcgcctcgccacccgcgacgacgtccccagggccgtacgcaccctcgccgccgcgttcgccgactaccccgccacgcgccacaccgtcgatccggaccgccacatcgagcgggtcaccgagctgcaagaactcttcctcacgcgcgtcgggctcgacatcggcaaggtgtgggtcgcggacgacggcgccgcggtggcggtctggaccacgccggagagcgtcgaagcgggggcggtgttcgccgagatcggcccgcgcatggccgagttgagcggttcccggctggccgcgcagcaacagatggaaggcctcctggcgccgcaccggcccaaggagcccgcgtggttcctggccaccgtcggcgtctcgcccgaccaccagggcaagggtctgggcagcgccgtcgtgctccccggagtggaggcggccgagcgcgccggggtgcccgccttcctggagacctccgcgccccgcaacctccccttctacgagcggctcggcttcaccgtcaccgccgacgtcgaggtgcccgaaggaccgcgcacctggtgcatgacccgcaagcccggtgcctga

SEQ ID NO: 8977 - DNA, 2496 bp, synthetic construct
  source 1..2496: mol_type = other DNA
atggccttaccagtgaccgccttgctcctgccgctggccttgctgctccacgccgccaggccgcagatcgtgctgacacagagccctgccatcatgtccgcttctcccggcgagaaagtgaccatgacatgtagcgccagcagcagcgtgtccttcatgcactggtatcagcagaagtccggcacaagccccaagcggtggatctacgataccagcacactggcctctggcgtgccagccagatttggcggatctggcagcggcacatcttacagcctgaccatcagcagcatggaagccgaagatgccgccacctactactgccagcagtggtccagcaatcccctgacatttggagccggcaccaagctggaactgaagagactcgagacagtggccgccccatctgtattcatctttcctccatctgatgaacagcttaagtccggcactgcttctgttgtttgcctgcttaacaatttttacccgcgggaagccaaggtgcaatggaaagtggacaacgccctgcagtctggtaacagtcaggaaagcgtgactgaacaggacagcaaagactccacatactccttgagttccaccttgacgctcagtaaggcagactacgagaagcacaaggtttatgcctgtgaagtgactcaccagggcctctctagcccagtgactaagtccttcaaccgcggggagtgttctggcggagctagaagcgaagatcggtatcggaaccccaagagggccaagcgatctggatctggagcaacaaacttctcactactcaaacaagcaggtgacgtggaggagaatcccgggcctactagtatggactggatttggcgcatccttttccttgtcggcgctgctaccggcgcgcattccttcgaacaagttcagctgcaacagagcggccctgagctggttaagcctggcgcttctgtgcggatctcttgcaaggccagcggctacaccttcaccagctactacatccactgggtcaagcagcggcctggacagggactcgaatggatcggctggatctaccccggcaacctgaacaccaagtacaacgagaagttcaagggcaaagccacactgaccgccgacaagagcagcagcacagcctacatgcagctgagcagcctgacaagcgaggacagcgccgtgtacttctgcgccagatacgactggtacttcgacgtgtggggagccggaaccaccgtgacagtttcttctacgcgtgcctctacaaagggaccctccgtgtttcctctggctccctgtagcagaagcaccagcgaatctacagccgctctgggctgcctggtcaaggactactttcctgagcctgtgaccgtgtcctggaacagcggagcactgacatctggcgtgcacacctttccagccgtgctccaaagcagcggcctgtactctctgagcagcgtggtcacagtgcctagctctagcctgggcaccaagacctacacctgtaatgtggaccacaagcctagcaacaccaaggtggacaagcgcgtggaatctaagtacggccctccttgtcctccatgtcctggtaccgaagtgaaaaccgactccaccgaccacgtgaagcccaaagagacagagaacaccaagcagcccagcaagagctgccacaagcccaaggccatcgtgcacaccgagaaagtgaacatgatgagcctgaccgtgctgggcttcagaatcctgctgctgaaagtggccggctttaacctgctgatgaccctgcggctgtggtccagccgcgccaagagaagcggatctggcgtgaagcagaccctgaatttcgacctgctgaagctggctggcgacgtggaatccaacccaggcccttctagaggccatatgaccgagtacaagcccacggtgcgcctcgccacccgcgacgacgtccccagggccgtacgcaccctcgccgccgcgttcgccgactaccccgccacgcgccacaccgtcgatccggaccgccacatcgagcgggtcaccgagctgcaagaactcttcctcacgcgcgtcgggctcgacatcggcaaggtgtgggtcgcggacgacggcgccgcggtggcggtctggaccacgccggagagcgtcgaagcgggggcggtgttcgccgagatcggcccgcgcatggccgagttgagcggttcccggctggccgcgcagcaacagatggaaggcctcctggcgccgcaccggcccaaggagcccgcgtggttcctggccaccgtcggcgtctcgcccgaccaccagggcaagggtctgggcagcgccgtcgtgctccccggagtggaggcggccgagcgcgccggggtgcccgccttcctggagacctccgcgccccgcaacctccccttctacgagcggctcggcttcaccgtcaccgccgacgtcgaggtgcccgaaggaccgcgcacctggtgcatgacccgcaagcccggtgcctga

SEQ ID NO: 8978 - DNA, 25 bp, synthetic construct
  source 1..25: mol_type = other DNA
ggggggggggggggggggggggggg

SEQ ID NO: 8979 - DNA, 1842 bp, synthetic construct
  source 1..1842: mol_type = other DNA
atggccttaccagtgaccgccttgctcctgccgctggccttgctgctccacgccgccaggccgcaggtgcagctggttgaatctggcggaggactggttcagcctggcggatctctgagactgtcttgtgccgccagcggcaacatcaacagcagaaactgcatgggctggttcagacaggcccctggcaagggaagagaaggcgtggcagctatcggccaagtgaccggcagaacctactacgtggacagcgtgaagggcagattcaccatcagcctggacaacagcaagaacaccctgtacctccagatgaacagcctgagagccgaggacaccgccgtgtactattgtgctgctgcccctggctgtctgctgtctgcacttagaagcgccgactacagaaactggggccagggcacactggtcaccgtttcttctacgcgtggaggcagtggtgtcttcacactcgaagatttcgttggggactggcgacagacagccggctacaacctggaccaagtccttgaacagggaggtgtgtccagtttgtttcagaatctcggggtgtccgtaactccgatccaaaggattgtcctgagcggtgaaaatgggctgaagatcgacatccatgtcatcatcccgtatgaaggtctgagcggcgaccaaatgggccagatcgaaaaaatttttaaggtggtgtaccctgtggatgatcatcactttaaggtgatcctgcactatggcacactggtaatcgacggggttacgccgaacatgatcgactatttcggacggccctatgaaggcatcgccgtgttcgacggcaaaaagatcactgtaacagggaccctgtggaacggcaacaaaattatcgacgagcgcctgatcaaccccgacggctccctgctgttccgagtaaccatcaacggagtgaccggctggcggctgtgcgaacgcattctggcgctcgagggaggcagctggagccaccctcagtttgaaaaagactacaaagacgatgacgataagggatcagattacaaggatgatgatgacaaggggtcagattataaagacgacgatgataaagggagcgactacaaggacgacgatgacaaggcctggtcccatccccagttcgagaaacaccatcaccaccaccatcatcacactagtggctccggcgagggcagaggaagtctactaacctgcggagatgtggaagaaaatcctggcccacatatgaccgagtacaagcccacggtgcgcctcgccacccgcgacgacgtccccagggccgtacgcaccctcgccgccgcgttcgccgactaccccgccacgcgccacaccgtcgatccggaccgccacatcgagcgggtcaccgagctgcaagaactcttcctcacgcgcgtcgggctcgacatcggcaaggtgtgggtcgcggacgacggcgccgcggtggcggtctggaccacgccggagagcgtcgaagcgggggcggtgttcgccgagatcggcccgcgcatggccgagttgagcggttcccggctggccgcgcagcaacagatggaaggcctcctggcgccgcaccggcccaaggagcccgcgtggttcctggccaccgtcggcgtctcgcccgaccaccagggcaagggtctgggcagcgccgtcgtgctccccggagtggaggcggccgagcgcgccggggtgcccgccttcctggagacctccgcgccccgcaacctccccttctacgagcggctcggcttcaccgtcaccgccgacgtcgaggtgcccgaaggaccgcgcacctggtgcatgacccgcaagcccggtgcctga

SEQ ID NO: 8980 - DNA, 1842 bp, synthetic construct
  source 1..1842: mol_type = other DNA
atggccttaccagtgaccgccttgctcctgccgctggccttgctgctccacgccgccaggccgcaggtgcagctggttgaatctggcggaggactggttcagcctggcggatctctgagactgtcttgtgccgccagcggcaacatcaacagcagatcctgcatgggctggttcagacaggcccctggcaagggaagagaaggcgtggcagctatcggacaagtgaccggcagatcctactacgtggacagcgtgaagggcagattcaccatcagcctggacaacagcaagaacaccctgtacctccagatgaacagcctgagagccgaggacaccgccgtgtactattgtgctgctgcccctggctgtctgctgtctgcacttagaagcgccgactacagaaactggggccagggcacactggtcaccgtttcttctacgcgtggaggcagtggtgtcttcacactcgaagatttcgttggggactggcgacagacagccggctacaacctggaccaagtccttgaacagggaggtgtgtccagtttgtttcagaatctcggggtgtccgtaactccgatccaaaggattgtcctgagcggtgaaaatgggctgaagatcgacatccatgtcatcatcccgtatgaaggtctgagcggcgaccaaatgggccagatcgaaaaaatttttaaggtggtgtaccctgtggatgatcatcactttaaggtgatcctgcactatggcacactggtaatcgacggggttacgccgaacatgatcgactatttcggacggccctatgaaggcatcgccgtgttcgacggcaaaaagatcactgtaacagggaccctgtggaacggcaacaaaattatcgacgagcgcctgatcaaccccgacggctccctgctgttccgagtaaccatcaacggagtgaccggctggcggctgtgcgaacgcattctggcgctcgagggaggcagctggagccaccctcagtttgaaaaagactacaaagacgatgacgataagggatcagattacaaggatgatgatgacaaggggtcagattataaagacgacgatgataaagggagcgactacaaggacgacgatgacaaggcctggtcccatccccagttcgagaaacaccatcaccaccaccatcatcacactagtggctccggcgagggcagaggaagtctactaacctgcggagatgtggaagaaaatcctggcccacatatgaccgagtacaagcccacggtgcgcctcgccacccgcgacgacgtccccagggccgtacgcaccctcgccgccgcgttcgccgactaccccgccacgcgccacaccgtcgatccggaccgccacatcgagcgggtcaccgagctgcaagaactcttcctcacgcgcgtcgggctcgacatcggcaaggtgtgggtcgcggacgacggcgccgcggtggcggtctggaccacgccggagagcgtcgaagcgggggcggtgttcgccgagatcggcccgcgcatggccgagttgagcggttcccggctggccgcgcagcaacagatggaaggcctcctggcgccgcaccggcccaaggagcccgcgtggttcctggccaccgtcggcgtctcgcccgaccaccagggcaagggtctgggcagcgccgtcgtgctccccggagtggaggcggccgagcgcgccggggtgcccgccttcctggagacctccgcgccccgcaacctccccttctacgagcggctcggcttcaccgtcaccgccgacgtcgaggtgcccgaaggaccgcgcacctggtgcatgacccgcaagcccggtgcctga

SEQ ID NO: 8981 - DNA, 1842 bp, synthetic construct; identical to SEQ ID NO: 8980
  source 1..1842: mol_type = other DNA

SEQ ID NO: 8982 - DNA, 1842 bp, synthetic construct
  source 1..1842: mol_type = other DNA
atggccttaccagtgaccgccttgctcctgccgctggccttgctgctccacgccgccaggccgcaggtgcagctggttgaatctggcggaggagtggttcagcctggcagatctctgagactgtcttgtgccgccagcggcaacatcaacagcagaaactgcatgggctggttcagacaggcccctggcaagggaagagaaggcgtggcagctatcggccaagtgaccggcagaacctactacgtggacagcgtgaagggcagattcaccatcagcctggacaacagcaagaacaccctgtacctccagatgaacagcctgagagccgaggacaccgccgtgtactattgtgctgctgcccctggctgtctgctgtctgcacttagaagcgccgactacagaaactggggccagggcacactggtcaccgtttcttctacgcgtggaggcagtggtgtcttcacactcgaagatttcgttggggactggcgacagacagccggctacaacctggaccaagtccttgaacagggaggtgtgtccagtttgtttcagaatctcggggtgtccgtaactccgatccaaaggattgtcctgagcggtgaaaatgggctgaagatcgacatccatgtcatcatcccgtatgaaggtctgagcggcgaccaaatgggccagatcgaaaaaatttttaaggtggtgtaccctgtggatgatcatcactttaaggtgatcctgcactatggcacactggtaatcgacggggttacgccgaacatgatcgactatttcggacggccctatgaaggcatcgccgtgttcgacggcaaaaagatcactgtaacagggaccctgtggaacggcaacaaaattatcgacgagcgcctgatcaaccccgacggctccctgctgttccgagtaaccatcaacggagtgaccggctggcggctgtgcgaacgcattctggcgctcgagggaggcagctggagccaccctcagtttgaaaaagactacaaagacgatgacgataagggatcagattacaaggatgatgatgacaaggggtcagattataaagacgacgatgataaagggagcgactacaaggacgacgatgacaaggcctggtcccatccccagttcgagaaacaccatcaccaccaccatcatcacactagtggctccggcgagggcagaggaagtctactaacctgcggagatgtggaagaaaatcctggcccacatatgaccgagtacaagcccacggtgcgcctcgccacccgcgacgacgtccccagggccgtacgcaccctcgccgccgcgttcgccgactaccccgccacgcgccacaccgtcgatccggaccgccacatcgagcgggtcaccgagctgcaagaactcttcctcacgcgcgtcgggctcgacatcggcaaggtgtgggtcgcggacgacggcgccgcggtggcggtctggaccacgccggagagcgtcgaagcgggggcggtgttcgccgagatcggcccgcgcatggccgagttgagcggttcccggctggccgcgcagcaacagatggaaggcctcctggcgccgcaccggcccaaggagcccgcgtggttcctggccaccgtcggcgtctcgcccgaccaccagggcaagggtctgggcagcgccgtcgtgctccccggagtggaggcggccgagcgcgccggggtgcccgccttcctggagacctccgcgccccgcaacctccccttctacgagcggctcggcttcaccgtcaccgccgacgtcgaggtgcccgaaggaccgcgcacctggtgcatgacccgcaagcccggtgcctga

SEQ ID NO: 8983 - DNA, 1842 bp, synthetic construct
  source 1..1842: mol_type = other DNA
atggccttaccagtgaccgccttgctcctgccgctggccttgctgctccacgccgccaggccgcaggtgcagctggttgaatctggcggaggatctgttcaggctggcggctctctgagactgtcttgtggcgcttccggcaacatcagcagcagaaactgcatgggctggttcagacaggcccctggcaaagagagagaaggcgttgccgccatcggacaagtgaccggcagatcctactacgtggacagcgtgaagggcagattcaccatcagcctggacaacgccaagaacaccctgtacctccagatgaacacactgaagcccgaggacaccgccatgtactactgtgctgctgcccctggctgtctgctgtctgcacttagaagcgccgactacagaaactggggccagggaacccaagtgacagtgtctagtacgcgtggaggcagtggtgtcttcacactcgaagatttcgttggggactggcgacagacagccggctacaacctggaccaagtccttgaacagggaggtgtgtccagtttgtttcagaatctcggggtgtccgtaactccgatccaaaggattgtcctgagcggtgaaaatgggctgaagatcgacatccatgtcatcatcccgtatgaaggtctgagcggcgaccaaatgggccagatcgaaaaaatttttaaggtggtgtaccctgtggatgatcatcactttaaggtgatcctgcactatggcacactggtaatcgacggggttacgccgaacatgatcgactatttcggacggccctatgaaggcatcgccgtgttcgacggcaaaaagatcactgtaacagggaccctgtggaacggcaacaaaattatcgacgagcgcctgatcaaccccgacggctccctgctgttccgagtaaccatcaacggagtgaccggctggcggctgtgcgaacgcattctggcgctcgagggaggcagctggagccaccctcagtttgaaaaagactacaaagacgatgacgataagggatcagattacaaggatgatgatgacaaggggtcagattataaagacgacgatgataaagggagcgactacaaggacgacgatgacaaggcctggtcccatccccagttcgagaaacaccatcaccaccaccatcatcacactagtggctccggcgagggcagaggaagtctactaacctgcggagatgtggaagaaaatcctggcccacatatgaccgagtacaagcccacggtgcgcctcgccacccgcgacgacgtccccagggccgtacgcaccctcgccgccgcgttcgccgactaccccgccacgcgccacaccgtcgatccggaccgccacatcgagcgggtcaccgagctgcaagaactcttcctcacgcgcgtcgggctcgacatcggcaaggtgtgggtcgcggacgacggcgccgcggtggcggtctggaccacgccggagagcgtcgaagcgggggcggtgttcgccgagatcggcccgcgcatggccgagttgagcggttcccggctggccgcgcagcaacagatggaaggcctcctggcgccgcaccggcccaaggagcccgcgtggttcctggccaccgtcggcgtctcgcccgaccaccagggcaagggtctgggcagcgccgtcgtgctccccggagtggaggcggccgagcgcgccggggtgcccgccttcctggagacctccgcgccccgcaacctccccttctacgagcggctcggcttcaccgtcaccgccgacgtcgaggtgcccgaaggaccgcgcacctggtgcatgacccgcaagcccggtgcctga

SEQ ID NO: 8984 - DNA, 1842 bp, synthetic construct
  source 1..1842: mol_type = other DNA
atggccttaccagtgaccgccttgctcctgccgctggccttgctgctccacgccgccaggccgcaggtgcagctggttgaatctggcggaggactggttcagcctggcggatctctgagactgtcttgtgccgccagcggcagcatcaacagcagatcctgcatgggctggttcagacaggcccctggcaagggaagagaaggcgtggcagctatcggacaagtgaccggcagaacctactacgtggacagcgtgaagggcagattcaccatcagcctggacaacagcaagaacaccctgtacctccagatgaacagcctgagagccgaggacaccgccgtgtactattgtgctgctgcccctggctgtctgctgtctgcacttagaagcgccgactacagaaactggggccagggcacactggtcaccgtttcttctacgcgtggaggcagtggtgtcttcacactcgaagatttcgttggggactggcgacagacagccggctacaacctggaccaagtccttgaacagggaggtgtgtccagtttgtttcagaatctcggggtgtccgtaactccgatccaaaggattgtcctgagcggtgaaaatgggctgaagatcgacatccatgtcatcatcccgtatgaaggtctgagcggcgaccaaatgggccagatcgaaaaaatttttaaggtggtgtaccctgtggatgatcatcactttaaggtgatcctgcactatggcacactggtaatcgacggggttacgccgaacatgatcgactatttcggacggccctatgaaggcatcgccgtgttcgacggcaaaaagatcactgtaacagggaccctgtggaacggcaacaaaattatcgacgagcgcctgatcaaccccgacggctccctgctgttccgagtaaccatcaacggagtgaccggctggcggctgtgcgaacgcattctggcgctcgagggaggcagctggagccaccctcagtttgaaaaagactacaaagacgatgacgataagggatcagattacaaggatgatgatgacaaggggtcagattataaagacgacgatgataaagggagcgactacaaggacgacgatgacaaggcctggtcccatccccagttcgagaaacaccatcaccaccaccatcatcacactagtggctccggcgagggcagaggaagtctactaacctgcggagatgtggaagaaaatcctggcccacatatgaccgagtacaagcccacggtgcgcctcgccacccgcgacgacgtccccagggccgtacgcaccctcgccgccgcgttcgccgactaccccgccacgcgccacaccgtcgatccggaccgccacatcgagcgggtcaccgagctgcaagaactcttcctcacgcgcgtcgggctcgacatcggcaaggtgtgggtcgcggacgacggcgccgcggtggcggtctggaccacgccggagagcgtcgaagcgggggcggtgttcgccgagatcggcccgcgcatggccgagttgagcggttcccggctggccgcgcagcaacagatggaaggcctcctggcgccgcaccggcccaaggagcccgcgtggttcctggccaccgtcggcgtctcgcccgaccaccagggcaagggtctgggcagcgccgtcgtgctccccggagtggaggcggccgagcgcgccggggtgcccgccttcctggagacctccgcgccccgcaacctccccttctacgagcggctcggcttcaccgtcaccgccgacgtcgaggtgcccgaaggaccgcgcacctggtgcatgacccgcaagcccggtgcctga

SEQ ID NO: 8985 - DNA, 1842 bp, synthetic construct
  source 1..1842: mol_type = other DNA
atggccttaccagtgaccgccttgctcctgccgctggccttgctgctccacgccgccaggccgcaggtgcagctggttgaatctggcggaggactggttcagcctggcggatctctgagactgtcttgtgccgccagcggcaacatcagcagcagaaactgcatgggctggttcagacaggcccctggcaagggaagagaaggcgtggcagctatcggacaagtgaccggcagaacctactacgtggacagcgtgaagggcagattcaccatcagcctggacaacagcaagaacaccctgtacctccagatgaacagcctgagagccgaggacaccgccgtgtactattgtgctgctgcccctggctgtctgctgtctgcacttagaagcgccgactacagaaactggggccagggcacactggtcaccgtttcttctacgcgtggaggcagtggtgtcttcacactcgaagatttcgttggggactggcgacagacagccggctacaacctggaccaagtccttgaacagggaggtgtgtccagtttgtttcagaatctcggggtgtccgtaactccgatccaaaggattgtcctgagcggtgaaaatgggctgaagatcgacatccatgtcatcatcccgtatgaaggtctgagcggcgaccaaatgggccagatcgaaaaaatttttaaggtggtgtaccctgtggatgatcatcactttaaggtgatcctgcactatggcacactggtaatcgacggggttacgccgaacatgatcgactatttcggacggccctatgaaggcatcgccgtgttcgacggcaaaaagatcactgtaacagggaccctgtggaacggcaacaaaattatcgacgagcgcctgatcaaccccgacggctccctgctgttccgagtaaccatcaacggagtgaccggctggcggctgtgcgaacgcattctggcgctcgagggaggcagctggagccaccctcagtttgaaaaagactacaaagacgatgacgataagggatcagattacaaggatgatgatgacaaggggtcagattataaagacgacgatgataaagggagcgactacaaggacgacgatgacaaggcctggtcccatccccagttcgagaaacaccatcaccaccaccatcatcacactagtggctccggcgagggcagaggaagtctactaacctgcggagatgtggaagaaaatcctggcccacatatgaccgagtacaagcccacggtgcgcctcgccacccgcgacgacgtccccagggccgtacgcaccctcgccgccgcgttcgccgactaccccgccacgcgccacaccgtcgatccggaccgccacatcgagcgggtcaccgagctgcaagaactcttcctcacgcgcgtcgggctcgacatcggcaaggtgtgggtcgcggacgacggcgccgcggtggcggtctggaccacgccggagagcgtcgaagcgggggcggtgttcgccgagatcggcccgcgcatggccgagttgagcggttcccggctggccgcgcagcaacagatggaaggcctcctggcgccgcaccggcccaaggagcccgcgtggttcctggccaccgtcggcgtctcgcccgaccaccagggcaagggtctgggcagcgccgtcgtgctccccggagtggaggcggccgagcgcgccggggtgcccgccttcctggagacctccgcgccccgcaacctccccttctacgagcggctcggcttcaccgtcaccgccgacgtcgaggtgcccgaaggaccgcgcacctggtgcatgacccgcaagcccggtgcctga

SEQ ID NO: 8986 - DNA, 1842 bp, synthetic construct
  source 1..1842: mol_type = other DNA
atggccttaccagtgaccgccttgctcctgccgctggccttgctgctccacgccgccaggccgcaggtgcagctggttgaatctggcggaggactggttcagcctggcggatctctgagactgtcttgtgccgccagcggcagcatcaacagcagaaactgcatgggctggttcagacaggcccctggcaagggaagagaaggcgtggcagctatcggacaagtgaccggcagaacctactacgtggacagcgtgaagggcagattcaccatcagcctggacaacagcaagaacaccctgtacctccagatgaacagcctgagagccgaggacaccgccgtgtactattgtgctgctgcccctggctgtctgctgtctgcacttagaagcgccgactacagaaactggggccagggcacactggtcaccgtttcttctacgcgtggaggcagtggtgtcttcacactcgaagatttcgttggggactggcgacagacagccggctacaacctggaccaagtccttgaacagggaggtgtgtccagtttgtttcagaatctcggggtgtccgtaactccgatccaaaggattgtcctgagcggtgaaaatgggctgaagatcgacatccatgtcatcatcccgtatgaaggtctgagcggcgaccaaatgggccagatcgaaaaaatttttaaggtggtgtaccctgtggatgatcatcactttaaggtgatcctgcactatggcacactggtaatcgacggggttacgccgaacatgatcgactatttcggacggccctatgaaggcatcgccgtgttcgacggcaaaaagatcactgtaacagggaccctgtggaacggcaacaaaattatcgacgagcgcctgatcaaccccgacggctccctgctgttccgagtaaccatcaacggagtgaccggctggcggctgtgcgaacgcattctggcgctcgagggaggcagctggagccaccctcagtttgaaaaagactacaaagacgatgacgataagggatcagattacaaggatgatgatgacaaggggtcagattataaagacgacgatgataaagggagcgactacaaggacgacgatgacaaggcctggtcccatccccagttcgagaaacaccatcaccaccaccatcatcacactagtggctccggcgagggcagaggaagtctactaacctgcggagatgtggaagaaaatcctggcccacatatgaccgagtacaagcccacggtgcgcctcgccacccgcgacgacgtccccagggccgtacgcaccctcgccgccgcgttcgccgactaccccgccacgcgccacaccgtcgatccggaccgccacatcgagcgggtcaccgagctgcaagaactcttcctcacgcgcgtcgggctcgacatcggcaaggtgtgggtcgcggacgacggcgccgcggtggcggtctggaccacgccggagagcgtcgaagcgggggcggtgttcgccgagatcggcccgcgcatggccgagttgagcggttcccggctggccgcgcagcaacagatggaaggcctcctggcgccgcaccggcccaaggagcccgcgtggttcctggccaccgtcggcgtctcgcccgaccaccagggcaagggtctgggcagcgccgtcgtgctccccggagtggaggcggccgagcgcgccggggtgcccgccttcctggagacctccgcgccccgcaacctccccttctacgagcggctcggcttcaccgtcaccgccgacgtcgaggtgcccgaaggaccgcgcacctggtgcatgacccgcaagcccggtgcctga

SEQ ID NO: 8987 - DNA, 1842 bp, synthetic construct
  source 1..1842: mol_type = other DNA
atggccttaccagtgaccgccttgctcctgccgctggccttgctgctccacgccgccaggccgcaggtgcagctggttgaatctggcggaggatctgttcaggctggcggctctctgagactgtcttgtggcgcttccggcaacatcaacagcagaaactgcatgggctggttcagacaggcccctggcaaagagagagaaggcgttgccgccatcggacaagtgaccggcagatcctactacgtggacagcgtgaagggcagattcaccatcagcctggacaacgccaagaacaccctgtacctccagatgaacacactgaagcccgaggacaccgccatgtactactgtgctgctgcccctggctgtctgctgtctgcacttagaagcgccgactacagaaactggggccagggaacccaagtgacagtgtctagtacgcgtggaggcagtggtgtcttcacactcgaagatttcgttggggactggcgacagacagccggctacaacctggaccaagtccttgaacagggaggtgtgtccagtttgtttcagaatctcggggtgtccgtaactccgatccaaaggattgtcctgagcggtgaaaatgggctgaagatcgacatccatgtcatcatcccgtatgaaggtctgagcggcgaccaaatgggccagatcgaaaaaatttttaaggtggtgtaccctgtggatgatcatcactttaaggtgatcctgcactatggcacactggtaatcgacggggttacgccgaacatgatcgactatttcggacggccctatgaaggcatcgccgtgttcgacggcaaaaagatcactgtaacagggaccctgtggaacggcaacaaaattatcgacgagcgcctgatcaaccccgacggctccctgctgttccgagtaaccatcaacggagtgaccggctggcggctgtgcgaacgcattctggcgctcgagggaggcagctggagccaccctcagtttgaaaaagactacaaagacgatgacgataagggatcagattacaaggatgatgatgacaaggggtcagattataaagacgacgatgataaagggagcgactacaaggacgacgatgacaaggcctggtcccatccccagttcgagaaacaccatcaccaccaccatcatcacactagtggctccggcgagggcagaggaagtctactaacctgcggagatgtggaagaaaatcctggcccacatatgaccgagtacaagcccacggtgcgcctcgccacccgcgacgacgtccccagggccgtacgcaccctcgccgccgcgttcgccgactaccccgccacgcgccacaccgtcgatccggaccgccacatcgagcgggtcaccgagctgcaagaactcttcctcacgcgcgtcgggctcgacatcggcaaggtgtgggtcgcggacgacggcgccgcggtggcggtctggaccacgccggagagcgtcgaagcgggggcggtgttcgccgagatcggcccgcgcatggccgagttgagcggttcccggctggccgcgcagcaacagatggaaggcctcctggcgccgcaccggcccaaggagcccgcgtggttcctggccaccgtcggcgtctcgcccgaccaccagggcaagggtctgggcagcgccgtcgtgctccccggagtggaggcggccgagcgcgccggggtgcccgccttcctggagacctccgcgccccgcaacctccccttctacgagcggctcggcttcaccgtcaccgccgacgtcgaggtgcccgaaggaccgcgcacctggtgcatgacccgcaagcccggtgcctga

SEQ ID NO: 8988 - DNA, 1842 bp, synthetic construct
  source 1..1842: mol_type = other DNA
atggccttaccagtgaccgccttgctcctgccgctggccttgctgctccacgccgccaggccgcaggtgcagctggttgaatctggcggaggatctgttcaggctggcggctctctgagactgtcttgtggcgcttccggcaacatcagcagcagaaactgcatgggctggttcagacaggcccctggcaaagagagagaaggcgttgccgccatcggacaagtgaccggcagaacctactacgtggacagcgtgaagggcagattcaccatcagcctggacaacgccaagaacaccctgtacctccagatgaacacactgaagcccgaggacaccgccatgtactactgtgctgctgcccctggctgtctgctgtctgcacttagaagcgccgactacagaaactggggccagggaacccaagtgacagtgtctagtacgcgtggaggcagtggtgtcttcacactcgaagatttcgttggggactggcgacagacagccggctacaacctggaccaagtccttgaacagggaggtgtgtccagtttgtttcagaatctcggggtgtccgtaactccgatccaaaggattgtcctgagcggtgaaaatgggctgaagatcgacatccatgtcatcatcccgtatgaaggtctgagcggcgaccaaatgggccagatcgaaaaaatttttaaggtggtgtaccctgtggatgatcatcactttaaggtgatcctgcactatggcacactggtaatcgacggggttacgccgaacatgatcgactatttcggacggccctatgaaggcatcgccgtgttcgacggcaaaaagatcactgtaacagggaccctgtggaacggcaacaaaattatcgacgagcgcctgatcaaccccgacggctccctgctgttccgagtaaccatcaacggagtgaccggctggcggctgtgcgaacgcattctggcgctcgagggaggcagctggagccaccctcagtttgaaaaagactacaaagacgatgacgataagggatcagattacaaggatgatgatgacaaggggtcagattataaagacgacgatgataaagggagcgactacaaggacgacgatgacaaggcctggtcccatccccagttcgagaaacaccatcaccaccaccatcatcacactagtggctccggcgagggcagaggaagtctactaacctgcggagatgtggaagaaaatcctggcccacatatgaccgagtacaagcccacggtgcgcctcgccacccgcgacgacgtccccagggccgtacgcaccctcgccgccgcgttcgccgactaccccgccacgcgccacaccgtcgatccggaccgccacatcgagcgggtcaccgagctgcaagaactcttcctcacgcgcgtcgggctcgacatcggcaaggtgtgggtcgcggacgacggcgccgcggtggcggtctggaccacgccggagagcgtcgaagcgggggcggtgttcgccgagatcggcccgcgcatggccgagttgagcggttcccggctggccgcgcagcaacagatggaaggcctcctggcgccgcaccggcccaaggagcccgcgtggttcctggccaccgtcggcgtctcgcccgaccaccagggcaagggtctgggcagcgccgtcgtgctccccggagtggaggcggccgagcgcgccggggtgcccgccttcctggagacctccgcgccccgcaacctccccttctacgagcggctcggcttcaccgtcaccgccgacgtcgaggtgcccgaaggaccgcgcacctggtgcatgacccgcaagcccggtgcctga

SEQ ID NO: 8989 - DNA, 1842 bp, synthetic construct
  source 1..1842: mol_type = other DNA
atggccttaccagtgaccgccttgctcctgccgctggccttgctgctccacgccgccaggccggaagtgcagctgctggaatctggcggaggactggttcaggctggcggatctctgagactgtcttgtgccgccagcggcaacatcaacagcagatcctgcatgggctggttcagacaggcccctggcaagggaagagaaggcgtggcagctatcggacaagtgaccggcagaacctactacgtggacagcgtgaagggcagattcaccatcagcctggacaacagcaagaacaccctgtacctccagatgaacagcctgagagccgaggacaccgccgtgtactattgtgctgctgcccctggctgtctgctgtctgcacttagaagcgccgactacagaaactggggccagggcacactggtcaccgtttcttctacgcgtggaggcagtggtgtcttcacactcgaagatttcgttggggactggcgacagacagccggctacaacctggaccaagtccttgaacagggaggtgtgtccagtttgtttcagaatctcggggtgtccgtaactccgatccaaaggattgtcctgagcggtgaaaatgggctgaagatcgacatccatgtcatcatcccgtatgaaggtctgagcggcgaccaaatgggccagatcgaaaaaatttttaaggtggtgtaccctgtggatgatcatcactttaaggtgatcctgcactatggcacactggtaatcgacggggttacgccgaacatgatcgactatttcggacggccctatgaaggcatcgccgtgttcgacggcaaaaagatcactgtaacagggaccctgtggaacggcaacaaaattatcgacgagcgcctgatcaaccccgacggctccctgctgttccgagtaaccatcaacggagtgaccggctggcggctgtgcgaacgcattctggcgctcgagggaggcagctggagccaccctcagtttgaaaaagactacaaagacgatgacgataagggatcagattacaaggatgatgatgacaaggggtcagattataaagacgacgatgataaagggagcgactacaaggacgacgatgacaaggcctggtcccatccccagttcgagaaacaccatcaccaccaccatcatcacactagtggctccggcgagggcagaggaagtctactaacctgcggagatgtggaagaaaatcctggcccacatatgaccgagtacaagcccacggtgcgcctcgccacccgcgacgacgtccccagggccgtacgcaccctcgccgccgcgttcgccgactaccccgccacgcgccacaccgtcgatccggaccgccacatcgagcgggtcaccgagctgcaagaactcttcctcacgcgcgtcgggctcgacatcggcaaggtgtgggtcgcggacgacggcgccgcggtggcggtctggaccacgccggagagcgtcgaagcgggggcggtgttcgccgagatcggcccgcgcatggccgagttgagcggttcccggctggccgcgcagcaacagatggaaggcctcctggcgccgcaccggcccaaggagcccgcgtggttcctggccaccgtcggcgtctcgcccgaccaccagggcaagggtctgggcagcgccgtcgtgctccccggagtggaggcggccgagcgcgccggggtgcccgccttcctggagacctccgcgccccgcaacctccccttctacgagcggctcggcttcaccgtcaccgccgacgtcgaggtgcccgaaggaccgcgcacctggtgcatgacccgcaagcccggtgcctga

SEQ ID NO: 8990 - DNA, 2199 bp, synthetic construct
  source 1..2199: mol_type = other DNA
atggccttaccagtgaccgccttgctcctgccgctggccttgctgctccacgccgccaggccggacatccagatgacacagagccctagcagcctgtctgccagcgtgggagacagagtgaccatcacatgcaaggccagcgaccacatcaacaactggctggcctggtatcagcagaagcctggacaggcccctaagctgctgatctacggcgctaccacactggaaacaggcgtgcccagcagattttctggcagcggctctggcaccgactacaccctgacaatatccagcctccagcctgaggacttcgccacctactactgtcagcagagctggaacaccccttggacattcggccagggcaccaagctggaaatcaagagaggcggaggcggaagtggaggcggaggatctggcggcggaggctctcaagttcagcttcaacagcctggcgctgagctggtcaaacctggcgcttctgtgaagatgagctgcaaagccagcggctacgccttcagcagctcttggatcaactggatgaagcagaaacccggccagggactcgaatggatcggccaaatctatcccggcgacggcgacaccaactacaacggcaagttcaagggcagagccacactgaccgccgatacctctagcagcacagcctacatgcagctgagcagcctgaccagcgaagatagcgccgtgtacttctgtgcccggtccatcacaacagtcgtgggctgcgctatggactattggggccagggaacaagcgtgaccgtgtctagtacgcgtggaggcagtggtgtcttcacactcgaagatttcgttggggactggcgacagacagccggctacaacctggaccaagtccttgaacagggaggtgtgtccagtttgtttcagaatctcggggtgtccgtaactccgatccaaaggattgtcctgagcggtgaaaatgggctgaagatcgacatccatgtcatcatcccgtatgaaggtctgagcggcgaccaaatgggccagatcgaaaaaatttttaaggtggtgtaccctgtggatgatcatcactttaaggtgatcctgcactatggcacactggtaatcgacggggttacgccgaacatgatcgactatttcggacggccctatgaaggcatcgccgtgttcgacggcaaaaagatcactgtaacagggaccctgtggaacggcaacaaaattatcgacgagcgcctgatcaaccccgacggctccctgctgttccgagtaaccatcaacggagtgaccggctggcggctgtgcgaacgcattctggcgctcgagggaggcagctggagccaccctcagtttgaaaaagactacaaagacgatgacgataagggatcagattacaaggatgatgatgacaaggggtcagattataaagacgacgatgataaagggagcgactacaaggacgacgatgacaaggcctggtcccatccccagttcgagaaacaccatcaccaccaccatcatcacactagtggctccggcgagggcagaggaagtctactaacctgcggagatgtggaagaaaatcctggcccacatatgaccgagtacaagcccacggtgcgcctcgccacccgcgacgacgtccccagggccgtacgcaccctcgccgccgcgttcgccgactaccccgccacgcgccacaccgtcgatccggaccgccacatcgagcgggtcaccgagctgcaagaactcttcctcacgcgcgtcgggctcgacatcggcaaggtgtgggtcgcggacgacggcgccgcggtggcggtctggaccacgccggagagcgtcgaagcgggggcggtgttcgccgagatcggcccgcgcatggccgagttgagcggttcccggctggccgcgcagcaacagatggaaggcctcctggcgccgcaccggcccaaggagcccgcgtggttcctggccaccgtcggcgtctcgcccgaccaccagggcaagggtctgggcagcgccgtcgtgctccccggagtggaggcggccgagcgcgccggggtgcccgccttcctggagacctccgcgccccgcaacctccccttctacgagcggctcggcttcaccgtcaccgccgacgtcgaggtgcccgaaggaccgcgcacctggtgcatgacccgcaagcccggtgcctga

SEQ ID NO: 8991 - DNA, 1848 bp, synthetic construct
  source 1..1848: mol_type = other DNA
atggccttaccagtgaccgccttgctcctgccgctggccttgctgctccacgccgccaggccgttcgaacaggtgcagctggttgaatctggcggaggactggttcagcctggcggatctctgagactgtcttgtgccgccagcggcaacatcaacagcagaaactgcatgggctggttcagacaggcccctggcaagggaagagaaggcgtggcagctatcggacaagtgaccggcagatcctactacgtggacagcgtgaagggcagattcaccatcagcctggacaacagcaagaacaccctgtacctccagatgaacagcctgagagccgaggacaccgccgtgtactattgtgctgctgcccctggctgtctgctgtctgcacttagaagcgccgactacagaaactggggccagggcacactggtcaccgtttcttctacgcgtggaggcagtggtgtcttcacactcgaagatttcgttggggactggcgacagacagccggctacaacctggaccaagtccttgaacagggaggtgtgtccagtttgtttcagaatctcggggtgtccgtaactccgatccaaaggattgtcctgagcggtgaaaatgggctgaagatcgacatccatgtcatcatcccgtatgaaggtctgagcggcgaccaaatgggccagatcgaaaaaatttttaaggtggtgtaccctgtggatgatcatcactttaaggtgatcctgcactatggcacactggtaatcgacggggttacgccgaacatgatcgactatttcggacggccctatgaaggcatcgccgtgttcgacggcaaaaagatcactgtaacagggaccctgtggaacggcaacaaaattatcgacgagcgcctgatcaaccccgacggctccctgctgttccgagtaaccatcaacggagtgaccggctggcggctgtgcgaacgcattctggcgctcgagggaggcagctggagccaccctcagtttgaaaaagactacaaagacgatgacgataagggatcagattacaaggatgatgatgacaaggggtcagattataaagacgacgatgataaagggagcgactacaaggacgacgatgacaaggcctggtcccatccccagttcgagaaacaccatcaccaccaccatcatcacactagtggctccggcgagggcagaggaagtctactaacctgcggagatgtggaagaaaatcctggcccacatatgaccgagtacaagcccacggtgcgcctcgccacccgcgacgacgtccccagggccgtacgcaccctcgccgccgcgttcgccgactaccccgccacgcgccacaccgtcgatccggaccgccacatcgagcgggtcaccgagctgcaagaactcttcctcacgcgcgtcgggctcgacatcggcaaggtgtgggtcgcggacgacggcgccgcggtggcggtctggaccacgccggagagcgtcgaagcgggggcggtgttcgccgagatcggcccgcgcatggccgagttgagcggttcccggctggccgcgcagcaacagatggaaggcctcctggcgccgcaccggcccaaggagcccgcgtggttcctggccaccgtcggcgtctcgcccgaccaccagggcaagggtctgggcagcgccgtcgtgctccccggagtggaggcggccgagcgcgccggggtgcccgccttcctggagacctccgcgccccgcaacctccccttctacgagcggctcggcttcaccgtcaccgccgacgtcgaggtgcccgaaggaccgcgcacctggtgcatgacccgcaagcccggtgcctga

SEQ ID NO: 8992 - DNA, 1848 bp, synthetic construct
  source 1..1848: mol_type = other DNA
atggccttaccagtgaccgccttgctcctgccgctggccttgctgctccacgccgccaggccgttcgaacaggtgcagctggttgaatctggcggaggactggttcagcctggcggatctctgagactgtcttgtgccgccagcggcaacatcaacagcagaaactgcatgggctggttcagacaggcccctggcaagggaagagaaggcgtggcagctatcggacaagtgaccggcagatcctactacgtggacagcgtgaagggcagattcaccatcagcctggacaacagcaagaacaccctgtacctccagatgaacagcctgagagccgaggacaccgccgtgtactattgtgctgctgcccctggctgtctgctgtcttcccttagaagcgccgactacagaaactggggccagggcacactggtcaccgtttcttctacgcgtggaggcagtggtgtcttcacactcgaagatttcgttggggactggcgacagacagccggctacaacctggaccaagtccttgaacagggaggtgtgtccagtttgtttcagaatctcggggtgtccgtaactccgatccaaaggattgtcctgagcggtgaaaatgggctgaagatcgacatccatgtcatcatcccgtatgaaggtctgagcggcgaccaaatgggccagatcgaaaaaatttttaaggtggtgtaccctgtggatgatcatcactttaaggtgatcctgcactatggcacactggtaatcgacggggttacgccgaacatgatcgactatttcggacggccctatgaaggcatcgccgtgttcgacggcaaaaagatcactgtaacagggaccctgtggaacggcaacaaaattatcgacgagcgcctgatcaaccccgacggctccctgctgttccgagtaaccatcaacggagtgaccggctggcggctgtgcgaacgcattctggcgctcgagggaggcagctggagccaccctcagtttgaaaaagactacaaagacgatgacgataagggatcagattacaaggatgatgatgacaaggggtcagattataaagacgacgatgataaagggagcgactacaaggacgacgatgacaaggcctggtcccatccccagttcgagaaacaccatcaccaccaccatcatcacactagtggctccggcgagggcagaggaagtctactaacctgcggagatgtggaagaaaatcctggcccacatatgaccgagtacaagcccacggtgcgcctcgccacccgcgacgacgtccccagggccgtacgcaccctcgccgccgcgttcgccgactaccccgccacgcgccacaccgtcgatccggaccgccacatcgagcgggtcaccgagctgcaagaactcttcctcacgcgcgtcgggctcgacatcggcaaggtgtgggtcgcggacgacggcgccgcggtggcggtctggaccacgccggagagcgtcgaagcgggggcggtgttcgccgagatcggcccgcgcatggccgagttgagcggttcccggctggccgcgcagcaacagatggaaggcctcctggcgccgcaccggcccaaggagcccgcgtggttcctggccaccgtcggcgtctcgcccgaccaccagggcaagggtctgggcagcgccgtcgtgctccccggagtggaggcggccgagcgcgccggggtgcccgccttcctggagacctccgcgccccgcaacctccccttctacgagcggctcggcttcaccgtcaccgccgacgtcgaggtgcccgaaggaccgcgcacctggtgcatgacccgcaagcccggtgcctga

SEQ ID NO: 8993 - DNA, 1848 bp, synthetic construct
  source 1..1848: mol_type = other DNA
atggccttaccagtgaccgccttgctcctgccgctggccttgctgctccacgccgccaggccgttcgaacaggtgcagctggttgaatctggcggaggactggttcagcctggcggatctctgagactgtcttgtgccgccagcggcaacatcaacagcagaaactgcatgggctggttcagacaggcccctggcaagggaagagaaggcgtggcagctatcggacaagtgaccggcagatcctactacgtggacagcgtgaagggcagattcaccatcagcctggacaacagcaagaacaccctgtacctccagatgaacagcctgagagccgaggacaccgccgtgtactattgtgctgcttctcctggctgtctgctgtctgcacttagaagcgccgactacagaaactggggccagggcacactggtcaccgtttcttctacgcgtggaggcagtggtgtcttcacactcgaagatttcgttggggactggcgacagacagccggctacaacctggaccaagtccttgaacagggaggtgtgtccagtttgtttcagaatctcggggtgtccgtaactccgatccaaaggattgtcctgagcggtgaaaatgggctgaagatcgacatccatgtcatcatcccgtatgaaggtctgagcggcgaccaaatgggccagatcgaaaaaatttttaaggtggtgtaccctgtggatgatcatcactttaaggtgatcctgcactatggcacactggtaatcgacggggttacgccgaacatgatcgactatttcggacggccctatgaaggcatcgccgtgttcgacggcaaaaagatcactgtaacagggaccctgtggaacggcaacaaaattatcgacgagcgcctgatcaaccccgacggctccctgctgttccgagtaaccatcaacggagtgaccggctggcggctgtgcgaacgcattctggcgctcgagggaggcagctggagccaccctcagtttgaaaaagactacaaagacgatgacgataagggatcagattacaaggatgatgatgacaaggggtcagattataaagacgacgatgataaagggagcgactacaaggacgacgatgacaaggcctggtcccatccccagttcgagaaacaccatcaccaccaccatcatcacactagtggctccggcgagggcagaggaagtctactaacctgcggagatgtggaagaaaatcctggcccacatatgaccgagtacaagcccacggtgcgcctcgccacccgcgacgacgtccccagggccgtacgcaccctcgccgccgcgttcgccgactaccccgccacgcgccacaccgtcgatccggaccgccacatcgagcgggtcaccgagctgcaagaactcttcctcacgcgcgtcgggctcgacatcggcaaggtgtgggtcgcggacgacggcgccgcggtggcggtctggaccacgccggagagcgtcgaagcgggggcggtgttcgccgagatcggcccgcgcatggccgagttgagcggttcccggctggccgcgcagcaacagatggaaggcctcctggcgccgcaccggcccaaggagcccgcgtggttcctggccaccgtcggcgtctcgcccgaccaccagggcaagggtctgggcagcgccgtcgtgctccccggagtggaggcggccgagcgcgccggggtgcccgccttcctggagacctccgcgccccgcaacctccccttctacgagcggctcggcttcaccgtcaccgccgacgtcgaggtgcccgaaggaccgcgcacctggtgcatgacccgcaagcccggtgcctga

SEQ ID NO: 8994 - DNA, 1848 bp, synthetic construct
  source 1..1848: mol_type = other DNA
atggccttaccagtgaccgccttgctcctgccgctggccttgctgctccacgccgccaggccgttcgaacaggtgcagctggttgaatctggcggaggactggttcagcctggcggatctctgagactgtcttgtgccgccagcggcaacatcaacagcagaagctgcatgggctggttcagacaggcccctggcaagggaagagaaggcgtggcagctatcggacaagtgaccggcagaacctactacgtggacagcgtgaagggcagattcaccatcagcctggacaacagcaagaacaccctgtacctccagatgaacagcctgagagccgaggacaccgccgtgtactattgtgctgcttctcctggctgtctgctgtctgcacttagaagcgccgactacagaaactggggccagggcacactggtcaccgtttcttctacgcgtggaggcagtggtgtcttcacactcgaagatttcgttggggactggcgacagacagccggctacaacctggaccaagtccttgaacagggaggtgtgtccagtttgtttcagaatctcggggtgtccgtaactccgatccaaaggattgtcctgagcggtgaaaatgggctgaagatcgacatccatgtcatcatcccgtatgaaggtctgagcggcgaccaaatgggccagatcgaaaaaatttttaaggtggtgtaccctgtggatgatcatcactttaaggtgatcctgcactatggcacactggtaatcgacggggttacgccgaacatgatcgactatttcggacggccctatgaaggcatcgccgtgttcgacggcaaaaagatcactgtaacagggaccctgtggaacggcaacaaaattatcgacgagcgcctgatcaaccccgacggctccctgctgttccgagtaaccatcaacggagtgaccggctggcggctgtgcgaacgcattctggcgctcgagggaggcagctggagccaccctcagtttgaaaaagactacaaagacgatgacgataagggatcagattacaaggatgatgatgacaaggggtcagattataaagacgacgatgataaagggagcgactacaaggacgacgatgacaaggcctggtcccatccccagttcgagaaacaccatcaccaccaccatcatcacactagtggctccggcgagggcagaggaagtctactaacctgcggagatgtggaagaaaatcctggcccacatatgaccgagtacaagcccacggtgcgcctcgccacccgcgacgacgtccccagggccgtacgcaccctcgccgccgcgttcgccgactaccccgccacgcgccacaccgtcgatccggaccgccacatcgagcgggtcaccgagctgcaagaactcttcctcacgcgcgtcgggctcgacatcggcaaggtgtgggtcgcggacgacggcgccgcggtggcggtctggaccacgccggagagcgtcgaagcgggggcggtgttcgccgagatcggcccgcgcatggccgagttgagcggttcccggctggccgcgcagcaacagatggaaggcctcctggcgccgcaccggcccaaggagcccgcgtggttcctggccaccgtcggcgtctcgcccgaccaccagggcaagggtctgggcagcgccgtcgtgctccccggagtggaggcggccgagcgcgccggggtgcccgccttcctggagacctccgcgccccgcaacctccccttctacgagcggctcggcttcaccgtcaccgccgacgtcgaggtgcccgaaggaccgcgcacctggtgcatgacccgcaagcccggtgcctga

SEQ ID NO: 8995 - DNA, 1848 bp, synthetic construct
  source 1..1848: mol_type = other DNA
atggccttaccagtgaccgccttgctcctgccgctggccttgctgctccacgccgccaggccggaggtgcagctggttgaatctggcggaggatctgttcaggctggcggctctctgagactgtcttgtgccgcctctggctacacctacggcatcaactgcatgggctggttcagacaggcccctggcaaagaacgagaaggcgtggccgtgattagcaccggcggaggcagaaccgactaccgggattctgtgaagggcagattcaccatcagccaggacaacgccaagaacaccgtgtacctccagatgaacagcctgaagcctgaggacaccgccatgtactactgtgccggcaagaccacctatcctggctacggatgtggcctgggcagaagcgcctacaattattggggccagggcacccaagtgaccgtgtctagcacgcgtggaggcagtggtgtcttcacactcgaagatttcgttggggactggcgacagacagccggctacaacctggaccaagtccttgaacagggaggtgtgtccagtttgtttcagaatctcggggtgtccgtaactccgatccaaaggattgtcctgagcggtgaaaatgggctgaagatcgacatccatgtcatcatcccgtatgaaggtctgagcggcgaccaaatgggccagatcgaaaaaatttttaaggtggtgtaccctgtggatgatcatcactttaaggtgatcctgcactatggcacactggtaatcgacggggttacgccgaacatgatcgactatttcggacggccctatgaaggcatcgccgtgttcgacggcaaaaagatcactgtaacagggaccctgtggaacggcaacaaaattatcgacgagcgcctgatcaaccccgacggctccctgctgttccgagtaaccatcaacggagtgaccggctggcggctgtgcgaacgcattctggcgctcgagggaggcagctggagccaccctcagtttgaaaaagactacaaagacgatgacgataagggatcagattacaaggatgatgatgacaaggggtcagattataaagacgacgatgataaagggagcgactacaaggacgacgatgacaaggcctggtcccatccccagttcgagaaacaccatcaccaccaccatcatcacactagtggctccggcgagggcagaggaagtctactaacctgcggagatgtggaagaaaatcctggcccacatatgaccgagtacaagcccacggtgcgcctcgccacccgcgacgacgtccccagggccgtacgcaccctcgccgccgcgttcgccgactaccccgccacgcgccacaccgtcgatccggaccgccacatcgagcgggtcaccgagctgcaagaactcttcctcacgcgcgtcgggctcgacatcggcaaggtgtgggtcgcggacgacggcgccgcggtggcggtctggaccacgccggagagcgtcgaagcgggggcggtgttcgccgagatcggcccgcgcatggccgagttgagcggttcccggctggccgcgcagcaacagatggaaggcctcctggcgccgcaccggcccaaggagcccgcgtggttcctggccaccgtcggcgtctcgcccgaccaccagggcaagggtctgggcagcgccgtcgtgctccccggagtggaggcggccgagcgcgccggggtgcccgccttcctggagacctccgcgccccgcaacctccccttctacgagcggctcggcttcaccgtcaccgccgacgtcgaggtgcccgaaggaccgcgcacctggtgcatgacccgcaagcccggtgcctga

SEQ ID NO: 8996 - DNA, 1848 bp, synthetic construct
  source 1..1848: mol_type = other DNA
atggccttaccagtgaccgccttgctcctgccgctggccttgctgctccacgccgccaggccggaggtgcagctggttgaatctggcggaggatctgttcaggctggcggctctctgagactgtcttgtgccgcctctggctacacctacggcatcaactgcatgggctggttcagacaggcccctggcaaagaacgagaaggcgtggccgccatctctaccggcggaggcagaaccgactaccgggattctgtgaagggcagattcaccatcagccaggacaacgccaagaacaccgtgtacctccagatgaacagcctgaagcctgaggacaccgccatgtactactgtgccggcaagaccacctatcctggctacggatgtggcctgggcagaagcgcctacaattattggggccagggcacccaagtgaccgtgtctagcacgcgtggaggcagtggtgtcttcacactcgaagatttcgttggggactggcgacagacagccggctacaacctggaccaagtccttgaacagggaggtgtgtccagtttgtttcagaatctcggggtgtccgtaactccgatccaaaggattgtcctgagcggtgaaaatgggctgaagatcgacatccatgtcatcatcccgtatgaaggtctgagcggcgaccaaatgggccagatcgaaaaaatttttaaggtggtgtaccctgtggatgatcatcactttaaggtgatcctgcactatggcacactggtaatcgacggggttacgccgaacatgatcgactatttcggacggccctatgaaggcatcgccgtgttcgacggcaaaaagatcactgtaacagggaccctgtggaacggcaacaaaattatcgacgagcgcctgatcaaccccgacggctccctgctgttccgagtaaccatcaacggagtgaccggctggcggctgtgcgaacgcattctggcgctcgagggaggcagctggagccaccctcagtttgaaaaagactacaaagacgatgacgataagggatcagattacaaggatgatgatgacaaggggtcagattataaagacgacgatgataaagggagcgactacaaggacgacgatgacaaggcctggtcccatccccagttcgagaaacaccatcaccaccaccatcatcacactagtggctccggcgagggcagaggaagtctactaacctgcggagatgtggaagaaaatcctggcccacatatgaccgagtacaagcccacggtgcgcctcgccacccgcgacgacgtccccagggccgtacgcaccctcgccgccgcgttcgccgactaccccgccacgcgccacaccgtcgatccggaccgccacatcgagcgggtcaccgagctgcaagaactcttcctcacgcgcgtcgggctcgacatcggcaaggtgtgggtcgcggacgacggcgccgcggtggcggtctggaccacgccggagagcgtcgaagcgggggcggtgttcgccgagatcggcccgcgcatggccgagttgagcggttcccggctggccgcgcagcaacagatggaaggcctcctggcgccgcaccggcccaaggagcccgcgtggttcctggccaccgtcggcgtctcgcccgaccaccagggcaagggtctgggcagcgccgtcgtgctccccggagtggaggcggccgagcgcgccggggtgcccgccttcctggagacctccgcgccccgcaacctccccttctacgagcggctcggcttcaccgtcaccgccgacgtcgaggtgcccgaaggaccgcgcacctggtgcatgacccgcaagcccggtgcctga

SEQ ID NO: 8997 - DNA, 1848 bp, synthetic construct
  source 1..1848: mol_type = other DNA
atggccttaccagtgaccgccttgctcctgccgctggccttgctgctccacgccgccaggccgcaggtgcagctggttgaatctggcggaggactggttcagcctggcggatctctgagactgtcttgtgccgccagcggctacacctacggcatcaactgtatgggctggttcagacaggcccctggcaagggaagagaaggcgtggccgttattagcaccggcggaggcagaaccgactaccgggattctgtgaagggcagattcaccatcagccaggacaacagcaagaacaccgtgtacctgcagatgaacagcctgagagccgaggacaccgccatgtactattgtgccggcaagaccacctatcctggctacggatgtggcctgggcagaagcgcctacaattattggggccagggcacccaagtgaccgtgtctagcacgcgtggaggcagtggtgtcttcacactcgaagatttcgttggggactggcgacagacagccggctacaacctggaccaagtccttgaacagggaggtgtgtccagtttgtttcagaatctcggggtgtccgtaactccgatccaaaggattgtcctgagcggtgaaaatgggctgaagatcgacatccatgtcatcatcccgtatgaaggtctgagcggcgaccaaatgggccagatcgaaaaaatttttaaggtggtgtaccctgtggatgatcatcactttaaggtgatcctgcactatggcacactggtaatcgacggggttacgccgaacatgatcgactatttcggacggccctatgaaggcatcgccgtgttcgacggcaaaaagatcactgtaacagggaccctgtggaacggcaacaaaattatcgacgagcgcctgatcaaccccgacggctccctgctgttccgagtaaccatcaacggagtgaccggctggcggctgtgcgaacgcattctggcgctcgagggaggcagctggagccaccctcagtttgaaaaagactacaaagacgatgacgataagggatcagattacaaggatgatgatgacaaggggtcagattataaagacgacgatgataaagggagcgactacaaggacgacgatgacaaggcctggtcccatccccagttcgagaaacaccatcaccaccaccatcatcacactagtggctccggcgagggcagaggaagtctactaacctgcggagatgtggaagaaaatcctggcccacatatgaccgagtacaagcccacggtgcgcctcgccacccgcgacgacgtccccagggccgtacgcaccctcgccgccgcgttcgccgactaccccgccacgcgccacaccgtcgatccggaccgccacatcgagcgggtcaccgagctgcaagaactcttcctcacgcgcgtcgggctcgacatcggcaaggtgtgggtcgcggacgacggcgccgcggtggcggtctggaccacgccggagagcgtcgaagcgggggcggtgttcgccgagatcggcccgcgcatggccgagttgagcggttcccggctggccgcgcagcaacagatggaaggcctcctggcgccgcaccggcccaaggagcccgcgtggttcctggccaccgtcggcgtctcgcccgaccaccagggcaagggtctgggcagcgccgtcgtgctccccggagtggaggcggccgagcgcgccggggtgcccgccttcctggagacctccgcgccccgcaacctccccttctacgagcggctcggcttcaccgtcaccgccgacgtcgaggtgcccgaaggaccgcgcacctggtgcatgacccgcaagcccggtgcctga

SEQ ID NO: 8998 - DNA, 1860 bp, synthetic construct
  source 1..1860: mol_type = other DNA
atggccctgcctgtgacagctctgctgctgcctctggcactgctgctgcacgccgccagacctcaggttcagctggtggaaagcggtggtggcgttgtgcaacctggcagaagtctgaggctgagctgtgtggcctccggctacacatactctattaactgcatgggatggtttcggcaggctcccggaaaaggcagagagggaattgccgccatctctacaggcggcggaacaacaggcgtggcagatagcgtgaaaggccggttcaccatctctcaggacaatgccaagaatacggtctatctccagatgaactctctgcgggccgaagatacagccatgtattactgcgccgccaggtccacctacagcggctatgcctgtgtgtacagcgaagtgaacggctacaactacagaggccagggaacacaagtcacagtcagcagcggtaccgaaacgcgtggaggcagtggtgtcttcacactcgaagatttcgttggggactggcgacagacagccggctacaacctggaccaagtccttgaacagggaggtgtgtccagtttgtttcagaatctcggggtgtccgtaactccgatccaaaggattgtcctgagcggtgaaaatgggctgaagatcgacatccatgtcatcatcccgtatgaaggtctgagcggcgaccaaatgggccagatcgaaaaaatttttaaggtggtgtaccctgtggatgatcatcactttaaggtgatcctgcactatggcacactggtaatcgacggggttacgccgaacatgatcgactatttcggacggccctatgaaggcatcgccgtgttcgacggcaaaaagatcactgtaacagggaccctgtggaacggcaacaaaattatcgacgagcgcctgatcaaccccgacggctccctgctgttccgagtaaccatcaacggagtgaccggctggcggctgtgcgaacgcattctggcgctcgagggaggcagctggagccaccctcagtttgaaaaagactacaaagacgatgacgataagggatcagattacaaggatgatgatgacaaggggtcagattataaagacgacgatgataaagggagcgactacaaggacgacgatgacaaggcctggtcccatccccagttcgagaaacaccatcaccaccaccatcatcacactagtggctccggcgagggcagaggaagtctactaacctgcggagatgtggaagaaaatcctggcccacatatgaccgagtacaagcccacggtgcgcctcgccacccgcgacgacgtccccagggccgtacgcaccctcgccgccgcgttcgccgactaccccgccacgcgccacaccgtcgatccggaccgccacatcgagcgggtcaccgagctgcaagaactcttcctcacgcgcgtcgggctcgacatcggcaaggtgtgggtcgcggacgacggcgccgcggtggcggtctggaccacgccggagagcgtcgaagcgggggcggtgttcgccgagatcggcccgcgcatggccgagttgagcggttcccggctggccgcgcagcaacagatggaaggcctcctggcgccgcaccggcccaaggagcccgcgtggttcctggccaccgtcggcgtctcgcccgaccaccagggcaagggtctgggcagcgccgtcgtgctccccggagtggaggcggccgagcgcgccggggtgcccgccttcctggagacctccgcgccccgcaacctccccttctacgagcggctcggcttcaccgtcaccgccgacgtcgaggtgcccgaaggaccgcgcacctggtgcatgacccgcaagcccggtgcctga

SEQ ID NO: 8999 - DNA, 1848 bp, synthetic construct
  source 1..1848: mol_type = other DNA
atggccttaccagtgaccgccttgctcctgccgctggccttgctgctccacgccgccaggccggaggtgcagctggttgaatctggcggaggatctgttcaggctggcggctctctgagactgtcttgtgccgccagcggctacacctacagcatcaactgcatgggctggttcagacaggcccctggcaaagagagagaaggcgttgccgccatctctaccggcggaggcagaaccgattaccgggattctgtgaagggcagattcaccatcagccaggacaacgccaagaacaccgtgtacctccagatgaacagcctgaagcctgaggacaccgccatgtactactgtgccggcaagaccacctatcctggctacggatgtggcctgggcagaagcgcctacaattattggggccagggcacccaagtgaccgtgtcatctacgcgtggaggcagtggtgtcttcacactcgaagatttcgttggggactggcgacagacagccggctacaacctggaccaagtccttgaacagggaggtgtgtccagtttgtttcagaatctcggggtgtccgtaactccgatccaaaggattgtcctgagcggtgaaaatgggctgaagatcgacatccatgtcatcatcccgtatgaaggtctgagcggcgaccaaatgggccagatcgaaaaaatttttaaggtggtgtaccctgtggatgatcatcactttaaggtgatcctgcactatggcacactggtaatcgacggggttacgccgaacatgatcgactatttcggacggccctatgaaggcatcgccgtgttcgacggcaaaaagatcactgtaacagggaccctgtggaacggcaacaaaattatcgacgagcgcctgatcaaccccgacggctccctgctgttccgagtaaccatcaacggagtgaccggctggcggctgtgcgaacgcattctggcgctcgagggaggcagctggagccaccctcagtttgaaaaagactacaaagacgatgacgataagggatcagattacaaggatgatgatgacaaggggtcagattataaagacgacgatgataaagggagcgactacaaggacgacgatgacaaggcctggtcccatccccagttcgagaaacaccatcaccaccaccatcatcacactagtggctccggcgagggcagaggaagtctactaacctgcggagatgtggaagaaaatcctggcccacatatgaccgagtacaagcccacggtgcgcctcgccacccgcgacgacgtccccagggccgtacgcaccctcgccgccgcgttcgccgactaccccgccacgcgccacaccgtcgatccggaccgccacatcgagcgggtcaccgagctgcaagaactcttcctcacgcgcgtcgggctcgacatcggcaaggtgtgggtcgcggacgacggcgccgcggtggcggtctggaccacgccggagagcgtcgaagcgggggcggtgttcgccgagatcggcccgcgcatggccgagttgagcggttcccggctggccgcgcagcaacagatggaaggcctcctggcgccgcaccggcccaaggagcccgcgtggttcctggccaccgtcggcgtctcgcccgaccaccagggcaagggtctgggcagcgccgtcgtgctccccggagtggaggcggccgagcgcgccggggtgcccgccttcctggagacctccgcgccccgcaacctccccttctacgagcggctcggcttcaccgtcaccgccgacgtcgaggtgcccgaaggaccgcgcacctggtgcatgacccgcaagcccggtgcctga

SEQ ID NO: 9000 - DNA, 1860 bp, synthetic construct
  source 1..1860: mol_type = other DNA
atggccctgcctgtgacagctctgctgctgcctctggcactgctgctgcacgccgccagacctgaagttcagctggtggaaagcggtggcggatctgtgcaagcaggcggaagccttagactgagctgtgtggcttccggctacacatactctattaactgtatgggatggtttcggcaggctcccggaaaagagagagaaggcattgccgccatcagcacaggcggtggaacaacaggcgtggcagatagcgtgaaaggccggttcaccatctctcaggataatgccaaaaacacggtctatctgcaaatgaactccctcaagccagaggatacggctatgtattattgcgccgccagaagcacctatagcggctacgcctgtgtgtacagcgaagtgaacggctacaactacagaggccagggaacacaagtcacagtcagcagcggtaccgaaacgcgtggaggcagtggtgtcttcacactcgaagatttcgttggggactggcgacagacagccggctacaacctggaccaagtccttgaacagggaggtgtgtccagtttgtttcagaatctcggggtgtccgtaactccgatccaaaggattgtcctgagcggtgaaaatgggctgaagatcgacatccatgtcatcatcccgtatgaaggtctgagcggcgaccaaatgggccagatcgaaaaaatttttaaggtggtgtaccctgtggatgatcatcactttaaggtgatcctgcactatggcacactggtaatcgacggggttacgccgaacatgatcgactatttcggacggccctatgaaggcatcgccgtgttcgacggcaaaaagatcactgtaacagggaccctgtggaacggcaacaaaattatcgacgagcgcctgatcaaccccgacggctccctgctgttccgagtaaccatcaacggagtgaccggctggcggctgtgcgaacgcattctggcgctcgagggaggcagctggagccaccctcagtttgaaaaagactacaaagacgatgacgataagggatcagattacaaggatgatgatgacaaggggtcagattataaagacgacgatgataaagggagcgactacaaggacgacgatgacaaggcctggtcccatccccagttcgagaaacaccatcaccaccaccatcatcacactagtggctccggcgagggcagaggaagtctactaacctgcggagatgtggaagaaaatcctggcccacatatgaccgagtacaagcccacggtgcgcctcgccacccgcgacgacgtccccagggccgtacgcaccctcgccgccgcgttcgccgactaccccgccacgcgccacaccgtcgatccggaccgccacatcgagcgggtcaccgagctgcaagaactcttcctcacgcgcgtcgggctcgacatcggcaaggtgtgggtcgcggacgacggcgccgcggtggcggtctggaccacgccggagagcgtcgaagcgggggcggtgttcgccgagatcggcccgcgcatggccgagttgagcggttcccggctggccgcgcagcaacagatggaaggcctcctggcgccgcaccggcccaaggagcccgcgtggttcctggccaccgtcggcgtctcgcccgaccaccagggcaagggtctgggcagcgccgtcgtgctccccggagtggaggcggccgagcgcgccggggtgcccgccttcctggagacctccgcgccccgcaacctccccttctacgagcggctcggcttcaccgtcaccgccgacgtcgaggtgcccgaaggaccgcgcacctggtgcatgacccgcaagcccggtgcctga

SEQ ID NO: 9001 - DNA, 1851 bp, synthetic construct
  source 1..1851: mol_type = other DNA
atggccctgcctgtgacagctctgctgctgcctctggcactgctgctgcacgccgccagacctcaagttcagctggtggaaagcggtggtggcgttgtgcaacctggtggaagtctgaggctgagctgtgccgcttctggcctgagctttagcacctacactgtggcctggttcaggcaggctcccggaaagggtcttgaaggcgtggccgccattccttacaccagccagcacatggtgtacacagacagcgtcagaggccggttcaccatcagcagagacaactccaagaatacgctctatctccagatgaactctctgcgcgccgaagatacagccgtgtattactgcgccaccgacagacggcctggcacctctatgctggctatcaacggctacaacagatggggacagggaaccaccgtgaccgtgtcatctggtaccgaaacgcgtggaggcagtggtgtcttcacactcgaagatttcgttggggactggcgacagacagccggctacaacctggaccaagtccttgaacagggaggtgtgtccagtttgtttcagaatctcggggtgtccgtaactccgatccaaaggattgtcctgagcggtgaaaatgggctgaagatcgacatccatgtcatcatcccgtatgaaggtctgagcggcgaccaaatgggccagatcgaaaaaatttttaaggtggtgtaccctgtggatgatcatcactttaaggtgatcctgcactatggcacactggtaatcgacggggttacgccgaacatgatcgactatttcggacggccctatgaaggcatcgccgtgttcgacggcaaaaagatcactgtaacagggaccctgtggaacggcaacaaaattatcgacgagcgcctgatcaaccccgacggctccctgctgttccgagtaaccatcaacggagtgaccggctggcggctgtgcgaacgcattctggcgctcgagggaggcagctggagccaccctcagtttgaaaaagactacaaagacgatgacgataagggatcagattacaaggatgatgatgacaaggggtcagattataaagacgacgatgataaagggagcgactacaaggacgacgatgacaaggcctggtcccatccccagttcgagaaacaccatcaccaccaccatcatcacactagtggctccggcgagggcagaggaagtctactaacctgcggagatgtggaagaaaatcctggcccacatatgaccgagtacaagcccacggtgcgcctcgccacccgcgacgacgtccccagggccgtacgcaccctcgccgccgcgttcgccgactaccccgccacgcgccacaccgtcgatccggaccgccacatcgagcgggtcaccgagctgcaagaactcttcctcacgcgcgtcgggctcgacatcggcaaggtgtgggtcgcggacgacggcgccgcggtggcggtctggaccacgccggagagcgtcgaagcgggggcggtgttcgccgagatcggcccgcgcatggccgagttgagcggttcccggctggccgcgcagcaacagatggaaggcctcctggcgccgcaccggcccaaggagcccgcgtggttcctggccaccgtcggcgtctcgcccgaccaccagggcaagggtctgggcagcgccgtcgtgctccccggagtggaggcggccgagcgcgccggggtgcccgccttcctggagacctccgcgccccgcaacctccccttctacgagcggctcggcttcaccgtcaccgccgacgtcgaggtgcccgaaggaccgcgcacctggtgcatgacccgcaagcccggtgcctga

SEQ ID NO: 9002 - DNA, 1848 bp, synthetic construct; identical to SEQ ID NO: 8996
  source 1..1848: mol_type = other DNA

SEQ ID NO: 9003 - DNA, 1848 bp, synthetic construct
  source 1..1848: mol_type = other DNA
atggccttaccagtgaccgccttgctcctgccgctggccttgctgctccacgccgccaggccgcaggtgcagctggttgaatctggcggaggactggttcagcctggcagaagtctgagactgtcttgtgccgccagcggctacacctacggcatcaactgtatgggctggttcagacaggcccctggcaagggaagagaaggcgtggccgccatctctaccggcggaggcagaaccgactaccgggattctgtgaagggcagattcaccatcagccaggacaacagcaagaacaccgtgtacctgcagatgaacagcctgagagccgaggacaccgccatgtactattgtgccggcaagaccacctatcctggctacggatgtggcctgggcagaagcgcctacaattattggggccagggcacccaagtgaccgtgtctagcacgcgtggaggcagtggtgtcttcacactcgaagatttcgttggggactggcgacagacagccggctacaacctggaccaagtccttgaacagggaggtgtgtccagtttgtttcagaatctcggggtgtccgtaactccgatccaaaggattgtcctgagcggtgaaaatgggctgaagatcgacatccatgtcatcatcccgtatgaaggtctgagcggcgaccaaatgggccagatcgaaaaaatttttaaggtggtgtaccctgtggatgatcatcactttaaggtgatcctgcactatggcacactggtaatcgacggggttacgccgaacatgatcgactatttcggacggccctatgaaggcatcgccgtgttcgacggcaaaaagatcactgtaacagggaccctgtggaacggcaacaaaattatcgacgagcgcctgatcaaccccgacggctccctgctgttccgagtaaccatcaacggagtgaccggctggcggctgtgcgaacgcattctggcgctcgagggaggcagctggagccaccctcagtttgaaaaagactacaaagacgatgacgataagggatcagattacaaggatgatgatgacaaggggtcagattataaagacgacgatgataaagggagcgactacaaggacgacgatgacaaggcctggtcccatccccagttcgagaaacaccatcaccaccaccatcatcacactagtggctccggcgagggcagaggaagtctactaacctgcggagatgtggaagaaaatcctggcccacatatgaccgagtacaagcccacggtgcgcctcgccacccgcgacgacgtccccagggccgtacgcaccctcgccgccgcgttcgccgactaccccgccacgcgccacaccgtcgatccggaccgccacatcgagcgggtcaccgagctgcaagaactcttcctcacgcgcgtcgggctcgacatcggcaaggtgtgggtcgcggacgacggcgccgcggtggcggtctggaccacgccggagagcgtcgaagcgggggcggtgttcgccgagatcggcccgcgcatggccgagttgagcggttcccggctggccgcgcagcaacagatggaaggcctcctggcgccgcaccggcccaaggagcccgcgtggttcctggccaccgtcggcgtctcgcccgaccaccagggcaagggtctgggcagcgccgtcgtgctccccggagtggaggcggccgagcgcgccggggtgcccgccttcctggagacctccgcgccccgcaacctccccttctacgagcggctcggcttcaccgtcaccgccgacgtcgaggtgcccgaaggaccgcgcacctggtgcatgacccgcaagcccggtgcctga

SEQ ID NO: 9004 - DNA, 1848 bp, synthetic construct
  source 1..1848: mol_type = other DNA
atggccttaccagtgaccgccttgctcctgccgctggccttgctgctccacgccgccaggccggaggtgcagctggttgaatctggcggaggatctgttcaggctggcggctctctgagactgtcttgtgccgccagcggctacacctacagcatcaactgcatgggctggttcagacaggcccctggcaaagagagagaaggcgttgccgccatctctaccggcggaggcaccaccgattaccgggattctgtgaagggcagattcaccatcagccaggacaacgccaagaacaccgtgtacctccagatgaacagcctgaagcctgaggacaccgccatgtactactgtgccggcaagaccacctatcctggctacggatgtggcctgggcagaagcgcctacaattattggggccagggcacccaagtgaccgtgtcatctacgcgtggaggcagtggtgtcttcacactcgaagatttcgttggggactggcgacagacagccggctacaacctggaccaagtccttgaacagggaggtgtgtccagtttgtttcagaatctcggggtgtccgtaactccgatccaaaggattgtcctgagcggtgaaaatgggctgaagatcgacatccatgtcatcatcccgtatgaaggtctgagcggcgaccaaatgggccagatcgaaaaaatttttaaggtggtgtaccctgtggatgatcatcactttaaggtgatcctgcactatggcacactggtaatcgacggggttacgccgaacatgatcgactatttcggacggccctatgaaggcatcgccgtgttcgacggcaaaaagatcactgtaacagggaccctgtggaacggcaacaaaattatcgacgagcgcctgatcaaccccgacggctccctgctgttccgagtaaccatcaacggagtgaccggctggcggctgtgcgaacgcattctggcgctcgagggaggcagctggagccaccctcagtttgaaaaagactacaaagacgatgacgataagggatcagattacaaggatgatgatgacaaggggtcagattataaagacgacgatgataaagggagcgactacaaggacgacgatgacaaggcctggtcccatccccagttcgagaaacaccatcaccaccaccatcatcacactagtggctccggcgagggcagaggaagtctactaacctgcggagatgtggaagaaaatcctggcccacatatgaccgagtacaagcccacggtgcgcctcgccacccgcgacgacgtccccagggccgtacgcaccctcgccgccgcgttcgccgactaccccgccacgcgccacaccgtcgatccggaccgccacatcgagcgggtcaccgagctgcaagaactcttcctcacgcgcgtcgggctcgacatcggcaaggtgtgggtcgcggacgacggcgccgcggtggcggtctggaccacgccggagagcgtcgaagcgggggcggtgttcgccgagatcggcccgcgcatggccgagttgagcggttcccggctggccgcgcagcaacagatggaaggcctcctggcgccgcaccggcccaaggagcccgcgtggttcctggccaccgtcggcgtctcgcccgaccaccagggcaagggtctgggcagcgccgtcgtgctccccggagtggaggcggccgagcgcgccggggtgcccgccttcctggagacctccgcgccccgcaacctccccttctacgagcggctcggcttcaccgtcaccgccgacgtcgaggtgcccgaaggaccgcgcacctggtgcatgacccgcaagcccggtgcctga

SEQ ID NO: 9005 - DNA, 1122 bp, synthetic construct
  source 1..1122: mol_type = other DNA
atggccttaccagtgaccgccttgctcctgccgctggccttgctgctccacgccgccaggccggaggtgcagctggttgaatctggcggaggatctgttcaggctggcggctctctgagactgtcttgtgccgccagcggctacacctacagcatcaactgcatgggctggttcagacaggcccctggcaaagagagagaaggcgttgccgccatctctaccggcggaggcaccaccgattaccgggattctgtgaagggcagattcaccatcagccaggacaacgccaagaacaccgtgtacctccagatgaacagcctgaagcctgaggacaccgccatgtactactgtgccggcaagaccacctatcctggctacggatgtggcctgggcagaagcgcctacaattattggggccagggcacccaagtgaccgtgtcatctacgcgtaccacgacgccagcgccgcgaccaccaacaccggcgcccaccatcgcgtcgcagcccctgtccctgcgcccagaggcgtgccggccagcggcggggggcgcagtgcacacgagggggctggacttcgcctgtgacatctacatctgggcgcccttggccgggacttgtggggtccttctcctgtcactggttatcaccctttactgcaaacggggcagaaagaaactcctgtatatattcaaacaaccatttatgagaccagtacaaactactcaagaggaagatggctgtagctgccgatttccagaagaagaagaaggaggatgtgaactgagagtgaagttcagcaggagcgcagacgcccccgcgtaccagcagggccagaaccagctctataacgagctgaatctaggacgaagagaggagtacgatgttttggacaagagacgtggccgggaccctgagatggggggaaagccgagaaggaagaaccctcaggaaggcctgtacaatgaactgcagaaagataagatggcggaggcctacagtgagattgggatgaaaggcgagcgccggaggggcaaggggcacgatggcctttaccagggtctcagtacagccaccaaggacacctacgacgcccttcacatgcaggccctgccccctcgctaa

SEQ ID NO: 9006 - DNA, 1848 bp, synthetic construct
  source 1..1848: mol_type = other DNA
atggccttaccagtgaccgccttgctcctgccgctggccttgctgctccacgccgccaggccggaggtgcagctggttgaatctggcggaggatctgttcaggctggcggctctctgagactgtcttgtgccgccagcggctacacctacagcatcaactgcatgggctggttcagacaggcccctggcaaagagagagaaggcgttgccgccatctctaccggcggaggcaccaccgattaccgggattctgtgaagggcagattcaccatcagccaggacaacgccaagaacaccgtgtacctccagatgaacagcctgaagcctgaggacaccgccatgtactactgtgccggcagaaccacctatcctggctacggatgtggcctgggcagaagcgcctacaattattggggccagggcacccaagtgaccgtgtcatctacgcgtggaggcagtggtgtcttcacactcgaagatttcgttggggactggcgacagacagccggctacaacctggaccaagtccttgaacagggaggtgtgtccagtttgtttcagaatctcggggtgtccgtaactccgatccaaaggattgtcctgagcggtgaaaatgggctgaagatcgacatccatgtcatcatcccgtatgaaggtctgagcggcgaccaaatgggccagatcgaaaaaatttttaaggtggtgtaccctgtggatgatcatcactttaaggtgatcctgcactatggcacactggtaatcgacggggttacgccgaacatgatcgactatttcggacggccctatgaaggcatcgccgtgttcgacggcaaaaagatcactgtaacagggaccctgtggaacggcaacaaaattatcgacgagcgcctgatcaaccccgacggctccctgctgttccgagtaaccatcaacggagtgaccggctggcggctgtgcgaacgcattctggcgctcgagggaggcagctggagccaccctcagtttgaaaaagactacaaagacgatgacgataagggatcagattacaaggatgatgatgacaaggggtcagattataaagacgacgatgataaagggagcgactacaaggacgacgatgacaaggcctggtcccatccccagttcgagaaacaccatcaccaccaccatcatcacactagtggctccggcgagggcagaggaagtctactaacctgcggagatgtggaagaaaatcctggcccacatatgaccgagtacaagcccacggtgcgcctcgccacccgcgacgacgtccccagggccgtacgcaccctcgccgccgcgttcgccgactaccccgccacgcgccacaccgtcgatccggaccgccacatcgagcgggtcaccgagctgcaagaactcttcctcacgcgcgtcgggctcgacatcggcaaggtgtgggtcgcggacgacggcgccgcggtggcggtctggaccacgccggagagcgtcgaagcgggggcggtgttcgccgagatcggcccgcgcatggccgagttgagcggttcccggctggccgcgcagcaacagatggaaggcctcctggcgccgcaccggcccaaggagcccgcgtggttcctggccaccgtcggcgtctcgcccgaccaccagggcaagggtctgggcagcgccgtcgtgctccccggagtggaggcggccgagcgcgccggggtgcccgccttcctggagacctccgcgccccgcaacctccccttctacgagcggctcggcttcaccgtcaccgccgacgtcgaggtgcccgaaggaccgcgcacctggtgcatgacccgcaagcccggtgcctga

SEQ ID NO: 9007 - DNA, 1851 bp, synthetic construct
  source 1..1851: mol_type = other DNA
atggccctgcctgtgacagctctgctgctgcctctggcactgctgctgcacgccgccagacctcaggttcagctggtggaaagcggtggtggcgttgtgcaacctggcagaagtctgaggctgagctgtgtggcctccggctacacatactctattaactgcatgggatggtttcggcaggctcccggaaaaggcagagagggaattgccgccatctctacaggcggcggaacaacaggcgtggcagatagcgtgaaaggccggttcaccatctctcaggacaatgccaagaatacggtctatctccagatgaactctctgcgggccgaagatacagccatgtattactgcgccgccaggtccacctacagcggctatgcctgtgtgtacagcgaagtgaacggctacaactacaaaggccagggaacacaagtcacagtcagcagcacgcgtggaggcagtggtgtcttcacactcgaagatttcgttggggactggcgacagacagccggctacaacctggaccaagtccttgaacagggaggtgtgtccagtttgtttcagaatctcggggtgtccgtaactccgatccaaaggattgtcctgagcggtgaaaatgggctgaagatcgacatccatgtcatcatcccgtatgaaggtctgagcggcgaccaaatgggccagatcgaaaaaatttttaaggtggtgtaccctgtggatgatcatcactttaaggtgatcctgcactatggcacactggtaatcgacggggttacgccgaacatgatcgactatttcggacggccctatgaaggcatcgccgtgttcgacggcaaaaagatcactgtaacagggaccctgtggaacggcaacaaaattatcgacgagcgcctgatcaaccccgacggctccctgctgttccgagtaaccatcaacggagtgaccggctggcggctgtgcgaacgcattctggcgctcgagggaggcagctggagccaccctcagtttgaaaaagactacaaagacgatgacgataagggatcagattacaaggatgatgatgacaaggggtcagattataaagacgacgatgataaagggagcgactacaaggacgacgatgacaaggcctggtcccatccccagttcgagaaacaccatcaccaccaccatcatcacactagtggctccggcgagggcagaggaagtctactaacctgcggagatgtggaagaaaatcctggcccacatatgaccgagtacaagcccacggtgcgcctcgccacccgcgacgacgtccccagggccgtacgcaccctcgccgccgcgttcgccgactaccccgccacgcgccacaccgtcgatccggaccgccacatcgagcgggtcaccgagctgcaagaactcttcctcacgcgcgtcgggctcgacatcggcaaggtgtgggtcgcggacgacggcgccgcggtggcggtctggaccacgccggagagcgtcgaagcgggggcggtgttcgccgagatcggcccgcgcatggccgagttgagcggttcccggctggccgcgcagcaacagatggaaggcctcctggcgccgcaccggcccaaggagcccgcgtggttcctggccaccgtcggcgtctcgcccgaccaccagggcaagggtctgggcagcgccgtcgtgctccccggagtggaggcggccgagcgcgccggggtgcccgccttcctggagacctccgcgccccgcaacctccccttctacgagcggctcggcttcaccgtcaccgccgacgtcgaggtgcccgaaggaccgcgcacctggtgcatgacccgcaagcccggtgcctga

SEQ ID NO: 9008 - DNA, 1851 bp, synthetic construct
  source 1..1851: mol_type = other DNA
atggccctgcctgtgacagctctgctgctgcctctggcactgctgctgcacgccgccagacctcaggttcagctggtggaaagcggtggtggcgttgtgcaacctggcagaagtctgaggctgagctgtgtggcctccggctacacatactctattaactgcatgggatggtttcggcaggctcccggaaaaggcagagagggaattgccgccatctctacaggcggcggaagaacaggcgtggcagatagcgtgaaaggccggttcaccatctctcaggacaatgccaagaatacggtctatctccagatgaactctctgcgggccgaagatacagccatgtattactgcgccgccaggtccacctacagcggctatgcctgtgtgtacagcgaagtgaacggctacaactacaaaggccagggaacacaagtcacagtcagcagcacgcgtggaggcagtggtgtcttcacactcgaagatttcgttggggactggcgacagacagccggctacaacctggaccaagtccttgaacagggaggtgtgtccagtttgtttcagaatctcggggtgtccgtaactccgatccaaaggattgtcctgagcggtgaaaatgggctgaagatcgacatccatgtcatcatcccgtatgaaggtctgagcggcgaccaaatgggccagatcgaaaaaatttttaaggtggtgtaccctgtggatgatcatcactttaaggtgatcctgcactatggcacactggtaatcgacggggttacgccgaacatgatcgactatttcggacggccctatgaaggcatcgccgtgttcgacggcaaaaagatcactgtaacagggaccctgtggaacggcaacaaaattatcgacgagcgcctgatcaaccccgacggctccctgctgttccgagtaaccatcaacggagtgaccggctggcggctgtgcgaacgcattctggcgctcgagggaggcagctggagccaccctcagtttgaaaaagactacaaagacgatgacgataagggatcagattacaaggatgatgatgacaaggggtcagattataaagacgacgatgataaagggagcgactacaaggacgacgatgacaaggcctggtcccatccccagttcgagaaacaccatcaccaccaccatcatcacactagtggctccggcgagggcagaggaagtctactaacctgcggagatgtggaagaaaatcctggcccacatatgaccgagtacaagcccacggtgcgcctcgccacccgcgacgacgtccccagggccgtacgcaccctcgccgccgcgttcgccgactaccccgccacgcgccacaccgtcgatccggaccgccacatcgagcgggtcaccgagctgcaagaactcttcctcacgcgcgtcgggctcgacatcggcaaggtgtgggtcgcggacgacggcgccgcggtggcggtctggaccacgccggagagcgtcgaagcgggggcggtgttcgccgagatcggcccgcgcatggccgagttgagcggttcccggctggccgcgcagcaacagatggaaggcctcctggcgccgcaccggcccaaggagcccgcgtggttcctggccaccgtcggcgtctcgcccgaccaccagggcaagggtctgggcagcgccgtcgtgctccccggagtggaggcggccgagcgcgccggggtgcccgccttcctggagacctccgcgccccgcaacctccccttctacgagcggctcggcttcaccgtcaccgccgacgtcgaggtgcccgaaggaccgcgcacctggtgcatgacccgcaagcccggtgcctga

SEQ ID NO: 9009 - DNA, 1833 bp, synthetic construct
  source 1..1833: mol_type = other DNA
atggccttaccagtgaccgccttgctcctgccgctggccttgctgctccacgccgccaggccggaggtgcagctggttgaatctggcggaggactggttcagcctggcggatctctgagactgagctgtgctgcttctggccccacagtgtccatggcctggtttagacaggcccctggcaagctgagagaaggcgtggcacaaattcaggctggcggcggaagaatctactacgccgatcctgtgaagggcagattcaccatcagccgggacaacagcaagaacaccctgtacctgcagatgaacagcctgagagccgaggacaccgccgtgtactattgtgctgcacagctgagatgggacgtgtggcctattgcttggagcctgtacaactactggggccagggcacactggtcaccgtgtcatctacgcgtggaggcagtggtgtcttcacactcgaagatttcgttggggactggcgacagacagccggctacaacctggaccaagtccttgaacagggaggtgtgtccagtttgtttcagaatctcggggtgtccgtaactccgatccaaaggattgtcctgagcggtgaaaatgggctgaagatcgacatccatgtcatcatcccgtatgaaggtctgagcggcgaccaaatgggccagatcgaaaaaatttttaaggtggtgtaccctgtggatgatcatcactttaaggtgatcctgcactatggcacactggtaatcgacggggttacgccgaacatgatcgactatttcggacggccctatgaaggcatcgccgtgttcgacggcaaaaagatcactgtaacagggaccctgtggaacggcaacaaaattatcgacgagcgcctgatcaaccccgacggctccctgctgttccgagtaaccatcaacggagtgaccggctggcggctgtgcgaacgcattctggcgctcgagggaggcagctggagccaccctcagtttgaaaaagactacaaagacgatgacgataagggatcagattacaaggatgatgatgacaaggggtcagattataaagacgacgatgataaagggagcgactacaaggacgacgatgacaaggcctggtcccatccccagttcgagaaacaccatcaccaccaccatcatcacactagtggctccggcgagggcagaggaagtctactaacctgcggagatgtggaagaaaatcctggcccacatatgaccgagtacaagcccacggtgcgcctcgccacccgcgacgacgtccccagggccgtacgcaccctcgccgccgcgttcgccgactaccccgccacgcgccacaccgtcgatccggaccgccacatcgagcgggtcaccgagctgcaagaactcttcctcacgcgcgtcgggctcgacatcggcaaggtgtgggtcgcggacgacggcgccgcggtggcggtctggaccacgccggagagcgtcgaagcgggggcggtgttcgccgagatcggcccgcgcatggccgagttgagcggttcccggctggccgcgcagcaacagatggaaggcctcctggcgccgcaccggcccaaggagcccgcgtggttcctggccaccgtcggcgtctcgcccgaccaccagggcaagggtctgggcagcgccgtcgtgctccccggagtggaggcggccgagcgcgccggggtgcccgccttcctggagacctccgcgccccgcaacctccccttctacgagcggctcggcttcaccgtcaccgccgacgtcgaggtgcccgaaggaccgcgcacctggtgcatgacccgcaagcccggtgcctga

SEQ ID NO: 9010 - DNA, 1833 bp, synthetic construct
  source 1..1833: mol_type = other DNA
atggccttaccagtgaccgccttgctcctgccgctggccttgctgctccacgccgccaggccggaggtgcagctggttgaatctggcggaggactggttcagcctggcggatctctgagactgagctgtgctgcttctggccccacagtgtccatggcctggtttagacaggcccctggcaagctgagagaaggcgtggcacaaattcaggctggcggcggaagaatctactacgccgatcctgtgaagggcagattcaccatcagccgggacaacagcaagaacaccctgtacctgcagatgaacagcctgagagccgaggacaccgccgtgtactattgtgctgcacagctgagatgggaagtgtggcctatcgcttggagcctgtacaacttttggggccagggcaccctggtcaccgtgtcatctacgcgtggaggcagtggtgtcttcacactcgaagatttcgttggggactggcgacagacagccggctacaacctggaccaagtccttgaacagggaggtgtgtccagtttgtttcagaatctcggggtgtccgtaactccgatccaaaggattgtcctgagcggtgaaaatgggctgaagatcgacatccatgtcatcatcccgtatgaaggtctgagcggcgaccaaatgggccagatcgaaaaaatttttaaggtggtgtaccctgtggatgatcatcactttaaggtgatcctgcactatggcacactggtaatcgacggggttacgccgaacatgatcgactatttcggacggccctatgaaggcatcgccgtgttcgacggcaaaaagatcactgtaacagggaccctgtggaacggcaacaaaattatcgacgagcgcctgatcaaccccgacggctccctgctgttccgagtaaccatcaacggagtgaccggctggcggctgtgcgaacgcattctggcgctcgagggaggcagctggagccaccctcagtttgaaaaagactacaaagacgatgacgataagggatcagattacaaggatgatgatgacaaggggtcagattataaagacgacgatgataaagggagcgactacaaggacgacgatgacaaggcctggtcccatccccagttcgagaaacaccatcaccaccaccatcatcacactagtggctccggcgagggcagaggaagtctactaacctgcggagatgtggaagaaaatcctggcccacatatgaccgagtacaagcccacggtgcgcctcgccacccgcgacgacgtccccagggccgtacgcaccctcgccgccgcgttcgccgactaccccgccacgcgccacaccgtcgatccggaccgccacatcgagcgggtcaccgagctgcaagaactcttcctcacgcgcgtcgggctcgacatcggcaaggtgtgggtcgcggacgacggcgccgcggtggcggtctggaccacgccggagagcgtcgaagcgggggcggtgttcgccgagatcggcccgcgcatggccgagttgagcggttcccggctggccgcgcagcaacagatggaaggcctcctggcgccgcaccggcccaaggagcccgcgtggttcctggccaccgtcggcgtctcgcccgaccaccagggcaagggtctgggcagcgccgtcgtgctccccggagtggaggcggccgagcgcgccggggtgcccgccttcctggagacctccgcgccccgcaacctccccttctacgagcggctcggcttcaccgtcaccgccgacgtcgaggtgcccgaaggaccgcgcacctggtgcatgacccgcaagcccggtgcctga

SEQ ID NO: 9011 - DNA, 1833 bp, synthetic construct
  source 1..1833: mol_type = other DNA
atggccttaccagtgaccgccttgctcctgccgctggccttgctgctccacgccgccaggccggaggtgcagctggttgaatctggcggaggactggttcagcctggcggatctctgagactgagctgtgctgcttctggccccacagtgtccatggcctggtttagacaggcccctggcaagctgagagaaggcgtggcacaaattcaggctggcggcggaagaatctactacgccgatcctgtgaagggcagattcaccatcagccgggacaacagcaagaacaccctgtacctgcagatgaacagcctgagagccgaggacaccgccgtgtactattgtgctgcacagctgagatgggacgtgtggcctgttgcttggagcctgtacaacttttggggccagggcaccctggtcaccgtgtcatctacgcgtggaggcagtggtgtcttcacactcgaagatttcgttggggactggcgacagacagccggctacaacctggaccaagtccttgaacagggaggtgtgtccagtttgtttcagaatctcggggtgtccgtaactccgatccaaaggattgtcctgagcggtgaaaatgggctgaagatcgacatccatgtcatcatcccgtatgaaggtctgagcggcgaccaaatgggccagatcgaaaaaatttttaaggtggtgtaccctgtggatgatcatcactttaaggtgatcctgcactatggcacactggtaatcgacggggttacgccgaacatgatcgactatttcggacggccctatgaaggcatcgccgtgttcgacggcaaaaagatcactgtaacagggaccctgtggaacggcaacaaaattatcgacgagcgcctgatcaaccccgacggctccctgctgttccgagtaaccatcaacggagtgaccggctggcggctgtgcgaacgcattctggcgctcgagggaggcagctggagccaccctcagtttgaaaaagactacaaagacgatgacgataagggatcagattacaaggatgatgatgacaaggggtcagattataaagacgacgatgataaagggagcgactacaaggacgacgatgacaaggcctggtcccatccccagttcgagaaacaccatcaccaccaccatcatcacactagtggctccggcgagggcagaggaagtctactaacctgcggagatgtggaagaaaatcctggcccacatatgaccgagtacaagcccacggtgcgcctcgccacccgcgacgacgtccccagggccgtacgcaccctcgccgccgcgttcgccgactaccccgccacgcgccacaccgtcgatccggaccgccacatcgagcgggtcaccgagctgcaagaactcttcctcacgcgcgtcgggctcgacatcggcaaggtgtgggtcgcggacgacggcgccgcggtggcggtctggaccacgccggagagcgtcgaagcgggggcggtgttcgccgagatcggcccgcgcatggccgagttgagcggttcccggctggccgcgcagcaacagatggaaggcctcctggcgccgcaccggcccaaggagcccgcgtggttcctggccaccgtcggcgtctcgcccgaccaccagggcaagggtctgggcagcgccgtcgtgctccccggagtggaggcggccgagcgcgccggggtgcccgccttcctggagacctccgcgccccgcaacctccccttctacgagcggctcggcttcaccgtcaccgccgacgtcgaggtgcccgaaggaccgcgcacctggtgcatgacccgcaagcccggtgcctga

SEQ ID NO: 9012 - DNA, 2184 bp, synthetic construct
  source 1..2184: mol_type = other DNA
atggccttaccagtgaccgccttgctcctgccgctggccttgctgctccacgccgccaggccgcagatcgtgctgacacagagccccgccatcatgtctgttagccctggcgagaaagtgaccatgacctgtagcgccagcagcagcgtgaactacctgcactggttccagcagaagcccggcacaagccctaagctgtggctgtacagcaccagcaatctggcctctggcgtgccagccagattttctggctctggcagcggcaccagctacagcctgacaatcagcagcatggaagccgaggatgccgccacctactattgtcagcagcggagcatctacccaccttggacatttggcggaggcaccaagctggaaatcaaaggcggaggcggaagtggaggcggaggatctggcggcggaggctctgaagttcagctccagcagagcggccctgagcttgtgaaacctggcgcttccatgaagatcagctgcaaggccagcggcttcagcttcaccggctacaccatgaactgggtcaagcagtcccacggcaagaacctggaatggatcggcctgattagcccctacaacggcggcacctcctacaaccagaagttcaagggcaaggccacactgaccgtggacaagagcagcagcacagcctacatggagctgctgtccctgaccagcgaggacagcgccgtgtactactgcgccagagattacggctacgtgctggactattggggccagggcacaaccctgacagtgtctagtacgcgtggaggcagtggtgtcttcacactcgaagatttcgttggggactggcgacagacagccggctacaacctggaccaagtccttgaacagggaggtgtgtccagtttgtttcagaatctcggggtgtccgtaactccgatccaaaggattgtcctgagcggtgaaaatgggctgaagatcgacatccatgtcatcatcccgtatgaaggtctgagcggcgaccaaatgggccagatcgaaaaaatttttaaggtggtgtaccctgtggatgatcatcactttaaggtgatcctgcactatggcacactggtaatcgacggggttacgccgaacatgatcgactatttcggacggccctatgaaggcatcgccgtgttcgacggcaaaaagatcactgtaacagggaccctgtggaacggcaacaaaattatcgacgagcgcctgatcaaccccgacggctccctgctgttccgagtaaccatcaacggagtgaccggctggcggctgtgcgaacgcattctggcgctcgagggaggcagctggagccaccctcagtttgaaaaagactacaaagacgatgacgataagggatcagattacaaggatgatgatgacaaggggtcagattataaagacgacgatgataaagggagcgactacaaggacgacgatgacaaggcctggtcccatccccagttcgagaaacaccatcaccaccaccatcatcacactagtggctccggcgagggcagaggaagtctactaacctgcggagatgtggaagaaaatcctggcccacatatgaccgagtacaagcccacggtgcgcctcgccacccgcgacgacgtccccagggccgtacgcaccctcgccgccgcgttcgccgactaccccgccacgcgccacaccgtcgatccggaccgccacatcgagcgggtcaccgagctgcaagaactcttcctcacgcgcgtcgggctcgacatcggcaaggtgtgggtcgcggacgacggcgccgcggtggcggtctggaccacgccggagagcgtcgaagcgggggcggtgttcgccgagatcggcccgcgcatggccgagttgagcggttcccggctggccgcgcagcaacagatggaaggcctcctggcgccgcaccggcccaaggagcccgcgtggttcctggccaccgtcggcgtctcgcccgaccaccagggcaagggtctgggcagcgccgtcgtgctccccggagtggaggcggccgagcgcgccggggtgcccgccttcctggagacctccgcgccccgcaacctccccttctacgagcggctcggcttcaccgtcaccgccgacgtcgaggtgcccgaaggaccgcgcacctggtgcatgacccgcaagcccggtgcctga

SEQ ID NO: 9013 - DNA, 2184 bp, synthetic construct
  source 1..2184: mol_type = other DNA
atggccttaccagtgaccgccttgctcctgccgctggccttgctgctccacgccgccaggccgcagatcgtgctgacacagagccccagcatcatgtctgttagccctggcgagaaagtgaccatgacctgtagcgccagcagcagcgtgaactacctgcactggttccagcagaagcccggcacaagccctaagctgtggctgtacagcaccagcaatctggcctctggcgtgccagccagattttctggctctggcagcggcaccagctacagcctgacaatcagccgggtggccgccgaggatgccgccacctactattgtcagcagcggagcaactacccaccttggacatttggcggaggcaccaagctggaaatcaaaggcggaggcggaagtggaggcggaggatctggcggcggaggctctgaagttcagctccagcagagcggccctgagcttgtgaaacctggcgcttccgtgaagatcagctgcaaggccagcggcttcagcttcaccggctacaccatgaactgggtcaagcagtcccacgtgaagaacctggaatggatcggcctgattagcccctacaacggcggcacctcctacaaccagaagttcaagggcaaggccacactgaccgtggacaagagcagcagcacagcctacatggagctgctgtccctgaccagcgaggacagcgccgtgtactactgcgccagagattacggcttcgtgctggactattggggccagggcacaagcgtgacagtgtctagtacgcgtggaggcagtggtgtcttcacactcgaagatttcgttggggactggcgacagacagccggctacaacctggaccaagtccttgaacagggaggtgtgtccagtttgtttcagaatctcggggtgtccgtaactccgatccaaaggattgtcctgagcggtgaaaatgggctgaagatcgacatccatgtcatcatcccgtatgaaggtctgagcggcgaccaaatgggccagatcgaaaaaatttttaaggtggtgtaccctgtggatgatcatcactttaaggtgatcctgcactatggcacactggtaatcgacggggttacgccgaacatgatcgactatttcggacggccctatgaaggcatcgccgtgttcgacggcaaaaagatcactgtaacagggaccctgtggaacggcaacaaaattatcgacgagcgcctgatcaaccccgacggctccctgctgttccgagtaaccatcaacggagtgaccggctggcggctgtgcgaacgcattctggcgctcgagggaggcagctggagccaccctcagtttgaaaaagactacaaagacgatgacgataagggatcagattacaaggatgatgatgacaaggggtcagattataaagacgacgatgataaagggagcgactacaaggacgacgatgacaaggcctggtcccatccccagttcgagaaacaccatcaccaccaccatcatcacactagtggctccggcgagggcagaggaagtctactaacctgcggagatgtggaagaaaatcctggcccacatatgaccgagtacaagcccacggtgcgcctcgccacccgcgacgacgtccccagggccgtacgcaccctcgccgccgcgttcgccgactaccccgccacgcgccacaccgtcgatccggaccgccacatcgagcgggtcaccgagctgcaagaactcttcctcacgcgcgtcgggctcgacatcggcaaggtgtgggtcgcggacgacggcgccgcggtggcggtctggaccacgccggagagcgtcgaagcgggggcggtgttcgccgagatcggcccgcgcatggccgagttgagcggttcccggctggccgcgcagcaacagatggaaggcctcctggcgccgcaccggcccaaggagcccgcgtggttcctggccaccgtcggcgtctcgcccgaccaccagggcaagggtctgggcagcgccgtcgtgctccccggagtggaggcggccgagcgcgccggggtgcccgccttcctggagacctccgcgccccgcaacctccccttctacgagcggctcggcttcaccgtcaccgccgacgtcgaggtgcccgaaggaccgcgcacctggtgcatgacccgcaagcccggtgcctga

SEQ ID NO: 9014 - DNA, 1833 bp, synthetic construct
  source 1..1833: mol_type = other DNA
atggccttaccagtgaccgccttgctcctgccgctggccttgctgctccacgccgccaggccggaggtgcagctggttgaatctggcggaggactggttcagcctggcggatctctgagactgagctgtgctgcttctggccccacagtgtccatggcctggtttagacaggcccctggcaagctgagagaaggcgtggcacagattcaggcctctggcggcagaatctactacgccgatcctgtgaagggcagattcaccatcagccgggacaacagcaagaacaccctgtacctgcagatgaacagcctgagagccgaggacaccgccgtgtactattgtgctgcacagctgagatgggacgtgtggcctattgcttggagcctgtacaacttctggggccagggcacactggtcaccgtgtcatctacgcgtggaggcagtggtgtcttcacactcgaagatttcgttggggactggcgacagacagccggctacaacctggaccaagtccttgaacagggaggtgtgtccagtttgtttcagaatctcggggtgtccgtaactccgatccaaaggattgtcctgagcggtgaaaatgggctgaagatcgacatccatgtcatcatcccgtatgaaggtctgagcggcgaccaaatgggccagatcgaaaaaatttttaaggtggtgtaccctgtggatgatcatcactttaaggtgatcctgcactatggcacactggtaatcgacggggttacgccgaacatgatcgactatttcggacggccctatgaaggcatcgccgtgttcgacggcaaaaagatcactgtaacagggaccctgtggaacggcaacaaaattatcgacgagcgcctgatcaaccccgacggctccctgctgttccgagtaaccatcaacggagtgaccggctggcggctgtgcgaacgcattctggcgctcgagggaggcagctggagccaccctcagtttgaaaaagactacaaagacgatgacgataagggatcagattacaaggatgatgatgacaaggggtcagattataaagacgacgatgataaagggagcgactacaaggacgacgatgacaaggcctggtcccatccccagttcgagaaacaccatcaccaccaccatcatcacactagtggctccggcgagggcagaggaagtctactaacctgcggagatgtggaagaaaatcctggcccacatatgaccgagtacaagcccacggtgcgcctcgccacccgcgacgacgtccccagggccgtacgcaccctcgccgccgcgttcgccgactaccccgccacgcgccacaccgtcgatccggaccgccacatcgagcgggtcaccgagctgcaagaactcttcctcacgcgcgtcgggctcgacatcggcaaggtgtgggtcgcggacgacggcgccgcggtggcggtctggaccacgccggagagcgtcgaagcgggggcggtgttcgccgagatcggcccgcgcatggccgagttgagcggttcccggctggccgcgcagcaacagatggaaggcctcctggcgccgcaccggcccaaggagcccgcgtggttcctggccaccgtcggcgtctcgcccgaccaccagggcaagggtctgggcagcgccgtcgtgctccccggagtggaggcggccgagcgcgccggggtgcccgccttcctggagacctccgcgccccgcaacctccccttctacgagcggctcggcttcaccgtcaccgccgacgtcgaggtgcccgaaggaccgcgcacctggtgcatgacccgcaagcccggtgcctga

SEQ ID NO: 9015 - DNA, 1833 bp, synthetic construct
  source 1..1833: mol_type = other DNA
atggccttaccagtgaccgccttgctcctgccgctggccttgctgctccacgccgccaggccggaggtgcagctggttgaatctggcggaggactggttcagcctggcggatctctgagactgagctgtgctgcttctggccccacagtgtccatggcctggtttagacaggcccctggcaagctgagagaaggcgtggcacagattcaggcctctggcggcagaatctactacgccgatcctgtgaagggcagattcaccatcagccgggacaacagcaagaacaccctgtacctgcagatgaacagcctgagagccgaggacaccgccgtgtactattgtgctgcacagctgagatgggacgtgtggcctattgcttggagcctgtacaacttctggggccagggcacccaagtgacagtctcttctacgcgtggaggcagtggtgtcttcacactcgaagatttcgttggggactggcgacagacagccggctacaacctggaccaagtccttgaacagggaggtgtgtccagtttgtttcagaatctcggggtgtccgtaactccgatccaaaggattgtcctgagcggtgaaaatgggctgaagatcgacatccatgtcatcatcccgtatgaaggtctgagcggcgaccaaatgggccagatcgaaaaaatttttaaggtggtgtaccctgtggatgatcatcactttaaggtgatcctgcactatggcacactggtaatcgacggggttacgccgaacatgatcgactatttcggacggccctatgaaggcatcgccgtgttcgacggcaaaaagatcactgtaacagggaccctgtggaacggcaacaaaattatcgacgagcgcctgatcaaccccgacggctccctgctgttccgagtaaccatcaacggagtgaccggctggcggctgtgcgaacgcattctggcgctcgagggaggcagctggagccaccctcagtttgaaaaagactacaaagacgatgacgataagggatcagattacaaggatgatgatgacaaggggtcagattataaagacgacgatgataaagggagcgactacaaggacgacgatgacaaggcctggtcccatccccagttcgagaaacaccatcaccaccaccatcatcacactagtggctccggcgagggcagaggaagtctactaacctgcggagatgtggaagaaaatcctggcccacatatgaccgagtacaagcccacggtgcgcctcgccacccgcgacgacgtccccagggccgtacgcaccctcgccgccgcgttcgccgactaccccgccacgcgccacaccgtcgatccggaccgccacatcgagcgggtcaccgagctgcaagaactcttcctcacgcgcgtcgggctcgacatcggcaaggtgtgggtcgcggacgacggcgccgcggtggcggtctggaccacgccggagagcgtcgaagcgggggcggtgttcgccgagatcggcccgcgcatggccgagttgagcggttcccggctggccgcgcagcaacagatggaaggcctcctggcgccgcaccggcccaaggagcccgcgtggttcctggccaccgtcggcgtctcgcccgaccaccagggcaagggtctgggcagcgccgtcgtgctccccggagtggaggcggccgagcgcgccggggtgcccgccttcctggagacctccgcgccccgcaacctccccttctacgagcggctcggcttcaccgtcaccgccgacgtcgaggtgcccgaaggaccgcgcacctggtgcatgacccgcaagcccggtgcctga

SEQ ID NO: 9016 - DNA, 2217 bp, synthetic construct
  source 1..2217: mol_type = other DNA
atggccttaccagtgaccgccttgctcctgccgctggccttgctgctccacgccgccaggccggagatcgtgctgacacagtctcccgccacactgtcactgtctccaggcgaaagagccacactgagctgtagcgtgtccagcagcatcagcagcagcaacctgcactggtatcagcagaagcctggacaggcccctcggctgctgatctacgccacatctaatctggcctctggcatccccgccagattttctggctctggaagcggcaccgacttcaccctgaccataagcagcctggaacctgaggacttcgccgtgtactactgccagcagtggtccagctatccccacacatttggcggaggcaccaaggtggaaatcaagagaggcggaggcggaagtggaggcggaggatctggcggcggaggctctcaggttcagctggttcagagcggagccgaagtgaagaaacctggggcctctgtgaaggtgtcctgcaaggcttccggctacacctttaccaactacctgatcgagtgggtccgacaggctccaggacaaggactggaatggatgggcctgattaaccctggcagcggcggcaccaactacaacgagaagttcaagggcagagtgaccatgaccaccgacaccagcacaagcaccgcctacatggaactgcggagcctgagaagcgacgacaccgccgtgtattattgcgccagaagaagccctctcggctcttggatctactacgcctatgacggcgtggcctattggggccagggaacactggttacagtgtcctctacgcgtggaggcagtggtgtcttcacactcgaagatttcgttggggactggcgacagacagccggctacaacctggaccaagtccttgaacagggaggtgtgtccagtttgtttcagaatctcggggtgtccgtaactccgatccaaaggattgtcctgagcggtgaaaatgggctgaagatcgacatccatgtcatcatcccgtatgaaggtctgagcggcgaccaaatgggccagatcgaaaaaatttttaaggtggtgtaccctgtggatgatcatcactttaaggtgatcctgcactatggcacactggtaatcgacggggttacgccgaacatgatcgactatttcggacggccctatgaaggcatcgccgtgttcgacggcaaaaagatcactgtaacagggaccctgtggaacggcaacaaaattatcgacgagcgcctgatcaaccccgacggctccctgctgttccgagtaaccatcaacggagtgaccggctggcggctgtgcgaacgcattctggcgctcgagggaggcagctggagccaccctcagtttgaaaaagactacaaagacgatgacgataagggatcagattacaaggatgatgatgacaaggggtcagattataaagacgacgatgataaagggagcgactacaaggacgacgatgacaaggcctggtcccatccccagttcgagaaacaccatcaccaccaccatcatcacactagtggctccggcgagggcagaggaagtctactaacctgcggagatgtggaagaaaatcctggcccacatatgaccgagtacaagcccacggtgcgcctcgccacccgcgacgacgtccccagggccgtacgcaccctcgccgccgcgttcgccgactaccccgccacgcgccacaccgtcgatccggaccgccacatcgagcgggtcaccgagctgcaagaactcttcctcacgcgcgtcgggctcgacatcggcaaggtgtgggtcgcggacgacggcgccgcggtggcggtctggaccacgccggagagcgtcgaagcgggggcggtgttcgccgagatcggcccgcgcatggccgagttgagcggttcccggctggccgcgcagcaacagatggaaggcctcctggcgccgcaccggcccaaggagcccgcgtggttcctggccaccgtcggcgtctcgcccgaccaccagggcaagggtctgggcagcgccgtcgtgctccccggagtggaggcggccgagcgcgccggggtgcccgccttcctggagacctccgcgccccgcaacctccccttctacgagcggctcggcttcaccgtcaccgccgacgtcgaggtgcccgaaggaccgcgcacctggtgcatgacccgcaagcccggtgcctga

SEQ ID NO: 9017 - DNA, 2217 bp, synthetic construct
  source 1..2217: mol_type = other DNA
atggccttaccagtgaccgccttgctcctgccgctggccttgctgctccacgccgccaggccggagatcgtgctgacacagtctcccgccacactgtcactgtctccaggcgaaagagccacactgagctgtagcgtgtccagcagcatcagcagcagcaacctgcactggtatcagcagaagcctggacaggcccctcggctgctgatctacagcacatctaatctggcctctggcatccccgccagattttctggctctggaagcggcaccgacttcaccctgaccataagcagcctggaacctgaggacttcgccgtgtactactgccagcagtggtccagctatccccacacatttggcggaggcaccaaggtggaaatcaagagaggcggaggcggaagtggaggcggaggatctggcggcggaggctctcaggttcagctggttcagagcggagccgaagtgaagaaacctggggcctctgtgaaggtgtcctgcaaggcttccggctacacctttaccaactacctgatcgagtgggtccgacaggctccaggacaaggactggaatggatgggcctgattaaccctggcagcggcggcaccaactacaacgagaagttcaagggcagagtgaccatgaccaccgacaccagcacaagcaccgcctacatggaactgcggagcctgagaagcgacgacaccgccgtgtattattgcgccagaagaagccctctcggctcttggatctactacgcctatgacggcgtggcctattggggccagggaacactggttacagtgtcctctacgcgtggaggcagtggtgtcttcacactcgaagatttcgttggggactggcgacagacagccggctacaacctggaccaagtccttgaacagggaggtgtgtccagtttgtttcagaatctcggggtgtccgtaactccgatccaaaggattgtcctgagcggtgaaaatgggctgaagatcgacatccatgtcatcatcccgtatgaaggtctgagcggcgaccaaatgggccagatcgaaaaaatttttaaggtggtgtaccctgtggatgatcatcactttaaggtgatcctgcactatggcacactggtaatcgacggggttacgccgaacatgatcgactatttcggacggccctatgaaggcatcgccgtgttcgacggcaaaaagatcactgtaacagggaccctgtggaacggcaacaaaattatcgacgagcgcctgatcaaccccgacggctccctgctgttccgagtaaccatcaacggagtgaccggctggcggctgtgcgaacgcattctggcgctcgagggaggcagctggagccaccctcagtttgaaaaagactacaaagacgatgacgataagggatcagattacaaggatgatgatgacaaggggtcagattataaagacgacgatgataaagggagcgactacaaggacgacgatgacaaggcctggtcccatccccagttcgagaaacaccatcaccaccaccatcatcacactagtggctccggcgagggcagaggaagtctactaacctgcggagatgtggaagaaaatcctggcccacatatgaccgagtacaagcccacggtgcgcctcgccacccgcgacgacgtccccagggccgtacgcaccctcgccgccgcgttcgccgactaccccgccacgcgccacaccgtcgatccggaccgccacatcgagcgggtcaccgagctgcaagaactcttcctcacgcgcgtcgggctcgacatcggcaaggtgtgggtcgcggacgacggcgccgcggtggcggtctggaccacgccggagagcgtcgaagcgggggcggtgttcgccgagatcggcccgcgcatggccgagttgagcggttcccggctggccgcgcagcaacagatggaaggcctcctggcgccgcaccggcccaaggagcccgcgtggttcctggccaccgtcggcgtctcgcccgaccaccagggcaagggtctgggcagcgccgtcgtgctccccggagtggaggcggccgagcgcgccggggtgcccgccttcctggagacctccgcgccccgcaacctccccttctacgagcggctcggcttcaccgtcaccgccgacgtcgaggtgcccgaaggaccgcgcacctggtgcatgacccgcaagcccggtgcctga

SEQ ID NO: 9018 - DNA, 1107 bp, synthetic construct
  source 1..1107: mol_type = other DNA
atggccttaccagtgaccgccttgctcctgccgctggccttgctgctccacgccgccaggccggaggtgcagctggttgaatctggcggaggactggttcagcctggcggatctctgagactgagctgtgctgcttctggccccacagtgtccatggcctggtttagacaggcccctggcaagctgagagaaggcgtggcacaaattcaggctggcggcggaagaatctactacgccgatcctgtgaagggcagattcaccatcagccgggacaacagcaagaacaccctgtacctgcagatgaacagcctgagagccgaggacaccgccgtgtactattgtgctgcacagctgagatgggacgtgtggcctgttgcttggagcctgtacaacttttggggccagggcaccctggtcaccgtgtcatctacgcgtaccacgacgccagcgccgcgaccaccaacaccggcgcccaccatcgcgtcgcagcccctgtccctgcgcccagaggcgtgccggccagcggcggggggcgcagtgcacacgagggggctggacttcgcctgtgacatctacatctgggcgcccttggccgggacttgtggggtccttctcctgtcactggttatcaccctttactgcaaacggggcagaaagaaactcctgtatatattcaaacaaccatttatgagaccagtacaaactactcaagaggaagatggctgtagctgccgatttccagaagaagaagaaggaggatgtgaactgagagtgaagttcagcaggagcgcagacgcccccgcgtaccagcagggccagaaccagctctataacgagctgaatctaggacgaagagaggagtacgatgttttggacaagagacgtggccgggaccctgagatggggggaaagccgagaaggaagaaccctcaggaaggcctgtacaatgaactgcagaaagataagatggcggaggcctacagtgagattgggatgaaaggcgagcgccggaggggcaaggggcacgatggcctttaccagggtctcagtacagccaccaaggacacctacgacgcccttcacatgcaggccctgccccctcgctaa

SEQ ID NO: 9019 - DNA, 1821 bp, synthetic construct
  source 1..1821: mol_type = other DNA
atggccttaccagtgaccgccttgctcctgccgctggccttgctgctccacgccgccaggccgcaagtgcaactggttgaatccggtggcggcctggtgcaacccggcggatctctcagacttagctgtgccgcctccggcagaaccttcacaatgggatggtacaggcaggctccagggaaagggctcgagttcgtcagcgccatctctctgtctcccacactggcctactacgccgactctgtgaaaggccggttcaccatctccagagataatagcaagaacaccgtggtgctgcaaatgaactctctgagagccgaggatacagccctgtactattgtgccgctgaccggaagtccgtgatgagcatcagacccgattactggggacagggcacactggtcacagtgtctagtacgcgtggaggcagtggtgtcttcacactcgaagatttcgttggggactggcgacagacagccggctacaacctggaccaagtccttgaacagggaggtgtgtccagtttgtttcagaatctcggggtgtccgtaactccgatccaaaggattgtcctgagcggtgaaaatgggctgaagatcgacatccatgtcatcatcccgtatgaaggtctgagcggcgaccaaatgggccagatcgaaaaaatttttaaggtggtgtaccctgtggatgatcatcactttaaggtgatcctgcactatggcacactggtaatcgacggggttacgccgaacatgatcgactatttcggacggccctatgaaggcatcgccgtgttcgacggcaaaaagatcactgtaacagggaccctgtggaacggcaacaaaattatcgacgagcgcctgatcaaccccgacggctccctgctgttccgagtaaccatcaacggagtgaccggctggcggctgtgcgaacgcattctggcgctcgagggaggcagctggagccaccctcagtttgaaaaagactacaaagacgatgacgataagggatcagattacaaggatgatgatgacaaggggtcagattataaagacgacgatgataaagggagcgactacaaggacgacgatgacaaggcctggtcccatccccagttcgagaaacaccatcaccaccaccatcatcacactagtggctccggcgagggcagaggaagtctactaacctgcggagatgtggaagaaaatcctggcccacatatgaccgagtacaagcccacggtgcgcctcgccacccgcgacgacgtccccagggccgtacgcaccctcgccgccgcgttcgccgactaccccgccacgcgccacaccgtcgatccggaccgccacatcgagcgggtcaccgagctgcaagaactcttcctcacgcgcgtcgggctcgacatcggcaaggtgtgggtcgcggacgacggcgccgcggtggcggtctggaccacgccggagagcgtcgaagcgggggcggtgttcgccgagatcggcccgcgcatggccgagttgagcggttcccggctggccgcgcagcaacagatggaaggcctcctggcgccgcaccggcccaaggagcccgcgtggttcctggccaccgtcggcgtctcgcccgaccaccagggcaagggtctgggcagcgccgtcgtgctccccggagtggaggcggccgagcgcgccggggtgcccgccttcctggagacctccgcgccccgcaacctccccttctacgagcggctcggcttcaccgtcaccgccgacgtcgaggtgcccgaaggaccgcgcacctggtgcatgacccgcaagcccggtgcctga

SEQ ID NO: 9020 - DNA, 1821 bp, synthetic construct
  source 1..1821: mol_type = other DNA
atggccttaccagtgaccgccttgctcctgccgctggccttgctgctccacgccgccaggccggaagtgcaactggttgaatccggtggcggcctggtgcaacccggcggatctctcagacttagctgtgccgcctccggcagaaccttcacaatgggatggtacaggcaggctccagggaaagagagagagttcgtcgccgccatctctctgtctcccacactggcctactacgccgactctgtgaaaggccggttcaccatctccagagataatagcaagaacaccgtggtgctgcaaatgaactctctgagagccgaggatacagccctgtactattgtgccgctgaccggaagtccgtgatgagcatcagacccgattactggggacagggcacactggtcacagtgtctagtacgcgtggaggcagtggtgtcttcacactcgaagatttcgttggggactggcgacagacagccggctacaacctggaccaagtccttgaacagggaggtgtgtccagtttgtttcagaatctcggggtgtccgtaactccgatccaaaggattgtcctgagcggtgaaaatgggctgaagatcgacatccatgtcatcatcccgtatgaaggtctgagcggcgaccaaatgggccagatcgaaaaaatttttaaggtggtgtaccctgtggatgatcatcactttaaggtgatcctgcactatggcacactggtaatcgacggggttacgccgaacatgatcgactatttcggacggccctatgaaggcatcgccgtgttcgacggcaaaaagatcactgtaacagggaccctgtggaacggcaacaaaattatcgacgagcgcctgatcaaccccgacggctccctgctgttccgagtaaccatcaacggagtgaccggctggcggctgtgcgaacgcattctggcgctcgagggaggcagctggagccaccctcagtttgaaaaagactacaaagacgatgacgataagggatcagattacaaggatgatgatgacaaggggtcagattataaagacgacgatgataaagggagcgactacaaggacgacgatgacaaggcctggtcccatccccagttcgagaaacaccatcaccaccaccatcatcacactagtggctccggcgagggcagaggaagtctactaacctgcggagatgtggaagaaaatcctggcccacatatgaccgagtacaagcccacggtgcgcctcgccacccgcgacgacgtccccagggccgtacgcaccctcgccgccgcgttcgccgactaccccgccacgcgccacaccgtcgatccggaccgccacatcgagcgggtcaccgagctgcaagaactcttcctcacgcgcgtcgggctcgacatcggcaaggtgtgggtcgcggacgacggcgccgcggtggcggtctggaccacgccggagagcgtcgaagcgggggcggtgttcgccgagatcggcccgcgcatggccgagttgagcggttcccggctggccgcgcagcaacagatggaaggcctcctggcgccgcaccggcccaaggagcccgcgtggttcctggccaccgtcggcgtctcgcccgaccaccagggcaagggtctgggcagcgccgtcgtgctccccggagtggaggcggccgagcgcgccggggtgcccgccttcctggagacctccgcgccccgcaacctccccttctacgagcggctcggcttcaccgtcaccgccgacgtcgaggtgcccgaaggaccgcgcacctggtgcatgacccgcaagcccggtgcctga

SEQ ID NO: 9021 - DNA, 1824 bp, synthetic construct
  source 1..1824: mol_type = other DNA
atggccttaccagtgaccgccttgctcctgccgctggccttgctgctccacgccgccaggccgttcgaagtgcaactggttgaatccggtggcggcctggtgcaagcaggcggatctctcagacttagctgtgccgcctccggcagaaccttcacaatgggatggtttaggcaggctccagggaaagagagagagttcgtcgccgccatctctctgtctcccacactggcctactacgccgagtctgtgaaaggccggttcaccatctccagagataatgccaagaacaccgtggtgctgcaaatgaactctctgaaacccgaggatacagccctgtactattgtgccgctgaccggaagtccgtgatgagcatcagacccgattactggggacagggcacacaagtcacagtgtcctctacgcgtggaggcagtggtgtcttcacactcgaagatttcgttggggactggcgacagacagccggctacaacctggaccaagtccttgaacagggaggtgtgtccagtttgtttcagaatctcggggtgtccgtaactccgatccaaaggattgtcctgagcggtgaaaatgggctgaagatcgacatccatgtcatcatcccgtatgaaggtctgagcggcgaccaaatgggccagatcgaaaaaatttttaaggtggtgtaccctgtggatgatcatcactttaaggtgatcctgcactatggcacactggtaatcgacggggttacgccgaacatgatcgactatttcggacggccctatgaaggcatcgccgtgttcgacggcaaaaagatcactgtaacagggaccctgtggaacggcaacaaaattatcgacgagcgcctgatcaaccccgacggctccctgctgttccgagtaaccatcaacggagtgaccggctggcggctgtgcgaacgcattctggcgctcgagggaggcagctggagccaccctcagtttgaaaaagactacaaagacgatgacgataagggatcagattacaaggatgatgatgacaaggggtcagattataaagacgacgatgataaagggagcgactacaaggacgacgatgacaaggcctggtcccatccccagttcgagaaacaccatcaccaccaccatcatcacactagtggctccggcgagggcagaggaagtctactaacctgcggagatgtggaagaaaatcctggcccacatatgaccgagtacaagcccacggtgcgcctcgccacccgcgacgacgtccccagggccgtacgcaccctcgccgccgcgttcgccgactaccccgccacgcgccacaccgtcgatccggaccgccacatcgagcgggtcaccgagctgcaagaactcttcctcacgcgcgtcgggctcgacatcggcaaggtgtgggtcgcggacgacggcgccgcggtggcggtctggaccacgccggagagcgtcgaagcgggggcggtgttcgccgagatcggcccgcgcatggccgagttgagcggttcccggctggccgcgcagcaacagatggaaggcctcctggcgccgcaccggcccaaggagcccgcgtggttcctggccaccgtcggcgtctcgcccgaccaccagggcaagggtctgggcagcgccgtcgtgctccccggagtggaggcggccgagcgcgccggggtgcccgccttcctggagacctccgcgccccgcaacctccccttctacgagcggctcggcttcaccgtcaccgccgacgtcgaggtgcccgaaggaccgcgcacctggtgcatgacccgcaagcccggtgcctga

SEQ ID NO: 9022 - DNA, 1821 bp, synthetic construct
  source 1..1821: mol_type = other DNA
atggccttaccagtgaccgccttgctcctgccgctggccttgctgctccacgccgccaggccggaagtgcaactggttgaatccggtggcggcctggtgcaacccggcggatctctcagacttagctgtgccgcctccggcagaaccttcacaatgggatggttcaggcaggctccagggaaagggagagagttcgtcgccgccatctctctgtctcccacactggcctactacgccgactctgtgaaaggccggttcaccatctccagagataatagcaagaacaccgtggtgctgcaaatgaactctctgagagccgaggatacagccgtgtactattgtgccgctgaccggaagtccgtgatgagcatcagacccgattactggggacagggcacacaggtcacagtgtctagtacgcgtggaggcagtggtgtcttcacactcgaagatttcgttggggactggcgacagacagccggctacaacctggaccaagtccttgaacagggaggtgtgtccagtttgtttcagaatctcggggtgtccgtaactccgatccaaaggattgtcctgagcggtgaaaatgggctgaagatcgacatccatgtcatcatcccgtatgaaggtctgagcggcgaccaaatgggccagatcgaaaaaatttttaaggtggtgtaccctgtggatgatcatcactttaaggtgatcctgcactatggcacactggtaatcgacggggttacgccgaacatgatcgactatttcggacggccctatgaaggcatcgccgtgttcgacggcaaaaagatcactgtaacagggaccctgtggaacggcaacaaaattatcgacgagcgcctgatcaaccccgacggctccctgctgttccgagtaaccatcaacggagtgaccggctggcggctgtgcgaacgcattctggcgctcgagggaggcagctggagccaccctcagtttgaaaaagactacaaagacgatgacgataagggatcagattacaaggatgatgatgacaaggggtcagattataaagacgacgatgataaagggagcgactacaaggacgacgatgacaaggcctggtcccatccccagttcgagaaacaccatcaccaccaccatcatcacactagtggctccggcgagggcagaggaagtctactaacctgcggagatgtggaagaaaatcctggcccacatatgaccgagtacaagcccacggtgcgcctcgccacccgcgacgacgtccccagggccgtacgcaccctcgccgccgcgttcgccgactaccccgccacgcgccacaccgtcgatccggaccgccacatcgagcgggtcaccgagctgcaagaactcttcctcacgcgcgtcgggctcgacatcggcaaggtgtgggtcgcggacgacggcgccgcggtggcggtctggaccacgccggagagcgtcgaagcgggggcggtgttcgccgagatcggcccgcgcatggccgagttgagcggttcccggctggccgcgcagcaacagatggaaggcctcctggcgccgcaccggcccaaggagcccgcgtggttcctggccaccgtcggcgtctcgcccgaccaccagggcaagggtctgggcagcgccgtcgtgctccccggagtggaggcggccgagcgcgccggggtgcccgccttcctggagacctccgcgccccgcaacctccccttctacgagcggctcggcttcaccgtcaccgccgacgtcgaggtgcccgaaggaccgcgcacctggtgcatgacccgcaagcccggtgcctga

SEQ ID NO: 9023 - DNA, 1824 bp, synthetic construct
  source 1..1824: mol_type = other DNA
atggccttaccagtgaccgccttgctcctgccgctggccttgctgctccacgccgccaggccgttcgaagtgcaactggttgaatccggtggcggcctggtgcaagcaggcggatctctcagacttagctgtgccgcctccggcagaaccttcacaatgggatggtttaggcaggctccagggaaagagagagagttcgtcgccgccatctctctgtctcccacactggcctactacgccgactctgtgaaaggccggttcaccatctccagagataatgccaagaacaccgtggtgctgcaaatgaactctctgaaacccgaggatacagccctgtactattgtgccgctgaccggaagtccgtgatgagcatcagacccgattactggggacagggcacacaagtcacagtgtcctctacgcgtggaggcagtggtgtcttcacactcgaagatttcgttggggactggcgacagacagccggctacaacctggaccaagtccttgaacagggaggtgtgtccagtttgtttcagaatctcggggtgtccgtaactccgatccaaaggattgtcctgagcggtgaaaatgggctgaagatcgacatccatgtcatcatcccgtatgaaggtctgagcggcgaccaaatgggccagatcgaaaaaatttttaaggtggtgtaccctgtggatgatcatcactttaaggtgatcctgcactatggcacactggtaatcgacggggttacgccgaacatgatcgactatttcggacggccctatgaaggcatcgccgtgttcgacggcaaaaagatcactgtaacagggaccctgtggaacggcaacaaaattatcgacgagcgcctgatcaaccccgacggctccctgctgttccgagtaaccatcaacggagtgaccggctggcggctgtgcgaacgcattctggcgctcgagggaggcagctggagccaccctcagtttgaaaaagactacaaagacgatgacgataagggatcagattacaaggatgatgatgacaaggggtcagattataaagacgacgatgataaagggagcgactacaaggacgacgatgacaaggcctggtcccatccccagttcgagaaacaccatcaccaccaccatcatcacactagtggctccggcgagggcagaggaagtctactaacctgcggagatgtggaagaaaatcctggcccacatatgaccgagtacaagcccacggtgcgcctcgccacccgcgacgacgtccccagggccgtacgcaccctcgccgccgcgttcgccgactaccccgccacgcgccacaccgtcgatccggaccgccacatcgagcgggtcaccgagctgcaagaactcttcctcacgcgcgtcgggctcgacatcggcaaggtgtgggtcgcggacgacggcgccgcggtggcggtctggaccacgccggagagcgtcgaagcgggggcggtgttcgccgagatcggcccgcgcatggccgagttgagcggttcccggctggccgcgcagcaacagatggaaggcctcctggcgccgcaccggcccaaggagcccgcgtggttcctggccaccgtcggcgtctcgcccgaccaccagggcaagggtctgggcagcgccgtcgtgctccccggagtggaggcggccgagcgcgccggggtgcccgccttcctggagacctccgcgccccgcaacctccccttctacgagcggctcggcttcaccgtcaccgccgacgtcgaggtgcccgaaggaccgcgcacctggtgcatgacccgcaagcccggtgcctga

SEQ ID NO: 9024 - DNA, 1821 bp, synthetic construct
  source 1..1821: mol_type = other DNA
atggccttaccagtgaccgccttgctcctgccgctggccttgctgctccacgccgccaggccggaagtgcaactgctggaatccggtggcggcctggtgcaagcaggcggatctctcagacttagctgtgccgcctccggcagaaccttcacaatgggatggtttaggcaggctccagggaaagagagagagttcgtcgccgccatctctctgtctcccacactggcctactacgccgactctgtgaaaggccggttcaccatctccagagataatgccaagaacaccgtggtgctgcaaatgaactctctgaaacccgaggatacagccctgtactattgtgccgctgaccggaagtccgtgatgagcatcagacccgattactggggacagggcacactggtcacagtgtctagtacgcgtggaggcagtggtgtcttcacactcgaagatttcgttggggactggcgacagacagccggctacaacctggaccaagtccttgaacagggaggtgtgtccagtttgtttcagaatctcggggtgtccgtaactccgatccaaaggattgtcctgagcggtgaaaatgggctgaagatcgacatccatgtcatcatcccgtatgaaggtctgagcggcgaccaaatgggccagatcgaaaaaatttttaaggtggtgtaccctgtggatgatcatcactttaaggtgatcctgcactatggcacactggtaatcgacggggttacgccgaacatgatcgactatttcggacggccctatgaaggcatcgccgtgttcgacggcaaaaagatcactgtaacagggaccctgtggaacggcaacaaaattatcgacgagcgcctgatcaaccccgacggctccctgctgttccgagtaaccatcaacggagtgaccggctggcggctgtgcgaacgcattctggcgctcgagggaggcagctggagccaccctcagtttgaaaaagactacaaagacgatgacgataagggatcagattacaaggatgatgatgacaaggggtcagattataaagacgacgatgataaagggagcgactacaaggacgacgatgacaaggcctggtcccatccccagttcgagaaacaccatcaccaccaccatcatcacactagtggctccggcgagggcagaggaagtctactaacctgcggagatgtggaagaaaatcctggcccacatatgaccgagtacaagcccacggtgcgcctcgccacccgcgacgacgtccccagggccgtacgcaccctcgccgccgcgttcgccgactaccccgccacgcgccacaccgtcgatccggaccgccacatcgagcgggtcaccgagctgcaagaactcttcctcacgcgcgtcgggctcgacatcggcaaggtgtgggtcgcggacgacggcgccgcggtggcggtctggaccacgccggagagcgtcgaagcgggggcggtgttcgccgagatcggcccgcgcatggccgagttgagcggttcccggctggccgcgcagcaacagatggaaggcctcctggcgccgcaccggcccaaggagcccgcgtggttcctggccaccgtcggcgtctcgcccgaccaccagggcaagggtctgggcagcgccgtcgtgctccccggagtggaggcggccgagcgcgccggggtgcccgccttcctggagacctccgcgccccgcaacctccccttctacgagcggctcggcttcaccgtcaccgccgacgtcgaggtgcccgaaggaccgcgcacctggtgcatgacccgcaagcccggtgcctga

SEQ ID NO: 9025 - DNA, 1821 bp, synthetic construct
  source 1..1821: mol_type = other DNA
atggccttaccagtgaccgccttgctcctgccgctggccttgctgctccacgccgccaggccgcaagtgcaactggttgaatccggtggcggcctggtgcaagcaggcggatctctcagacttagctgtgccgcctccggcagaaccttcacaatgggatggtttaggcaggctccagggaaagagagagagttcgtcgccgccatctctctgtctcccacactggcctactacgccgactctgtgaaaggccggttcaccatctccagagataatgccaagaacaccgtggtgctgcaaatgaactctctgaaacccgaggatacagccctgtactattgtgccgctgaccggaagtccgtgatgagcatcagacccgattactggggacagggcacactggtcacagtgtctagtacgcgtggaggcagtggtgtcttcacactcgaagatttcgttggggactggcgacagacagccggctacaacctggaccaagtccttgaacagggaggtgtgtccagtttgtttcagaatctcggggtgtccgtaactccgatccaaaggattgtcctgagcggtgaaaatgggctgaagatcgacatccatgtcatcatcccgtatgaaggtctgagcggcgaccaaatgggccagatcgaaaaaatttttaaggtggtgtaccctgtggatgatcatcactttaaggtgatcctgcactatggcacactggtaatcgacggggttacgccgaacatgatcgactatttcggacggccctatgaaggcatcgccgtgttcgacggcaaaaagatcactgtaacagggaccctgtggaacggcaacaaaattatcgacgagcgcctgatcaaccccgacggctccctgctgttccgagtaaccatcaacggagtgaccggctggcggctgtgcgaacgcattctggcgctcgagggaggcagctggagccaccctcagtttgaaaaagactacaaagacgatgacgataagggatcagattacaaggatgatgatgacaaggggtcagattataaagacgacgatgataaagggagcgactacaaggacgacgatgacaaggcctggtcccatccccagttcgagaaacaccatcaccaccaccatcatcacactagtggctccggcgagggcagaggaagtctactaacctgcggagatgtggaagaaaatcctggcccacatatgaccgagtacaagcccacggtgcgcctcgccacccgcgacgacgtccccagggccgtacgcaccctcgccgccgcgttcgccgactaccccgccacgcgccacaccgtcgatccggaccgccacatcgagcgggtcaccgagctgcaagaactcttcctcacgcgcgtcgggctcgacatcggcaaggtgtgggtcgcggacgacggcgccgcggtggcggtctggaccacgccggagagcgtcgaagcgggggcggtgttcgccgagatcggcccgcgcatggccgagttgagcggttcccggctggccgcgcagcaacagatggaaggcctcctggcgccgcaccggcccaaggagcccgcgtggttcctggccaccgtcggcgtctcgcccgaccaccagggcaagggtctgggcagcgccgtcgtgctccccggagtggaggcggccgagcgcgccggggtgcccgccttcctggagacctccgcgccccgcaacctccccttctacgagcggctcggcttcaccgtcaccgccgacgtcgaggtgcccgaaggaccgcgcacctggtgcatgacccgcaagcccggtgcctga

SEQ ID NO: 9026 - DNA, 1821 bp, synthetic construct
  source 1..1821: mol_type = other DNA
atggccttaccagtgaccgccttgctcctgccgctggccttgctgctccacgccgccaggccggaagtgcaactgctggaatccggtggcggcctggtgcaagcaggcggatctctcagacttagctgtgccgcctccggcagaaccttcacaatgggatggtttaggcaggctccagggaaagagagagagttcgtcgccgccatctctctgtctcccacactggcctactacgccgactctgtgaaaggccggttcaccatctccagagataatgccaagaacaccgtggtgctgcaaatgaactctctgaaacccgaggatacagccctgtactattgtgccgctgaccggaagtccgtgatgagcatcagacccgattactggggacagggcacacaagtcacagtgtcctctacgcgtggaggcagtggtgtcttcacactcgaagatttcgttggggactggcgacagacagccggctacaacctggaccaagtccttgaacagggaggtgtgtccagtttgtttcagaatctcggggtgtccgtaactccgatccaaaggattgtcctgagcggtgaaaatgggctgaagatcgacatccatgtcatcatcccgtatgaaggtctgagcggcgaccaaatgggccagatcgaaaaaatttttaaggtggtgtaccctgtggatgatcatcactttaaggtgatcctgcactatggcacactggtaatcgacggggttacgccgaacatgatcgactatttcggacggccctatgaaggcatcgccgtgttcgacggcaaaaagatcactgtaacagggaccctgtggaacggcaacaaaattatcgacgagcgcctgatcaaccccgacggctccctgctgttccgagtaaccatcaacggagtgaccggctggcggctgtgcgaacgcattctggcgctcgagggaggcagctggagccaccctcagtttgaaaaagactacaaagacgatgacgataagggatcagattacaaggatgatgatgacaaggggtcagattataaagacgacgatgataaagggagcgactacaaggacgacgatgacaaggcctggtcccatccccagttcgagaaacaccatcaccaccaccatcatcacactagtggctccggcgagggcagaggaagtctactaacctgcggagatgtggaagaaaatcctggcccacatatgaccgagtacaagcccacggtgcgcctcgccacccgcgacgacgtccccagggccgtacgcaccctcgccgccgcgttcgccgactaccccgccacgcgccacaccgtcgatccggaccgccacatcgagcgggtcaccgagctgcaagaactcttcctcacgcgcgtcgggctcgacatcggcaaggtgtgggtcgcggacgacggcgccgcggtggcggtctggaccacgccggagagcgtcgaagcgggggcggtgttcgccgagatcggcccgcgcatggccgagttgagcggttcccggctggccgcgcagcaacagatggaaggcctcctggcgccgcaccggcccaaggagcccgcgtggttcctggccaccgtcggcgtctcgcccgaccaccagggcaagggtctgggcagcgccgtcgtgctccccggagtggaggcggccgagcgcgccggggtgcccgccttcctggagacctccgcgccccgcaacctccccttctacgagcggctcggcttcaccgtcaccgccgacgtcgaggtgcccgaaggaccgcgcacctggtgcatgacccgcaagcccggtgcctga

SEQ ID NO: 9027 - DNA, 1821 bp, synthetic construct
  source 1..1821: mol_type = other DNA
atggccttaccagtgaccgccttgctcctgccgctggccttgctgctccacgccgccaggccgcaagtgcaactggttgaatccggtggcggcctggtgcaagcaggcggatctctcagacttagctgtgccgcctccggcagaaccttcacaatgggatggtttaggcaggctccagggaaagagagagagttcgtcgccgccatctctctgtctcccacactggcctactacgccgactctgtgaaaggccggttcaccatctccagagataatgccaagaacaccgtggtgctgcaaatgaactctctgaaacccgaggatacagccctgtactattgtgccgctgaccggaagtccgtgatgagcatcagacccgattactggggacagggcacacaagtcacagtgtcctctacgcgtggaggcagtggtgtcttcacactcgaagatttcgttggggactggcgacagacagccggctacaacctggaccaagtccttgaacagggaggtgtgtccagtttgtttcagaatctcggggtgtccgtaactccgatccaaaggattgtcctgagcggtgaaaatgggctgaagatcgacatccatgtcatcatcccgtatgaaggtctgagcggcgaccaaatgggccagatcgaaaaaatttttaaggtggtgtaccctgtggatgatcatcactttaaggtgatcctgcactatggcacactggtaatcgacggggttacgccgaacatgatcgactatttcggacggccctatgaaggcatcgccgtgttcgacggcaaaaagatcactgtaacagggaccctgtggaacggcaacaaaattatcgacgagcgcctgatcaaccccgacggctccctgctgttccgagtaaccatcaacggagtgaccggctggcggctgtgcgaacgcattctggcgctcgagggaggcagctggagccaccctcagtttgaaaaagactacaaagacgatgacgataagggatcagattacaaggatgatgatgacaaggggtcagattataaagacgacgatgataaagggagcgactacaaggacgacgatgacaaggcctggtcccatccccagttcgagaaacaccatcaccaccaccatcatcacactagtggctccggcgagggcagaggaagtctactaacctgcggagatgtggaagaaaatcctggcccacatatgaccgagtacaagcccacggtgcgcctcgccacccgcgacgacgtccccagggccgtacgcaccctcgccgccgcgttcgccgactaccccgccacgcgccacaccgtcgatccggaccgccacatcgagcgggtcaccgagctgcaagaactcttcctcacgcgcgtcgggctcgacatcggcaaggtgtgggtcgcggacgacggcgccgcggtggcggtctggaccacgccggagagcgtcgaagcgggggcggtgttcgccgagatcggcccgcgcatggccgagttgagcggttcccggctggccgcgcagcaacagatggaaggcctcctggcgccgcaccggcccaaggagcccgcgtggttcctggccaccgtcggcgtctcgcccgaccaccagggcaagggtctgggcagcgccgtcgtgctccccggagtggaggcggccgagcgcgccggggtgcccgccttcctggagacctccgcgccccgcaacctccccttctacgagcggctcggcttcaccgtcaccgccgacgtcgaggtgcccgaaggaccgcgcacctggtgcatgacccgcaagcccggtgcctga

SEQ ID NO: 9028 - DNA, 1821 bp, synthetic construct
  source 1..1821: mol_type = other DNA
atggccttaccagtgaccgccttgctcctgccgctggccttgctgctccacgccgccaggccggaagtgcaactgctggaatccggtggcggcctggtgcaagcaggcggatctctcagacttagctgtgccgcctccggcagaaccttcacaatgggatggtttaggcaggctccagggaaagagagagagttcgtcgccgccatctctctgtctcccacactggcctactacgccagctctgtgagaggccggttcaccatctccagagataatgccaagaacaccgtggtgctgcaaatgaactctctgaaacccgaggatacagccctgtactattgtgccgctgaccggaagtccgtgatgagcatcagacccgattactggggacagggcacacaagtcacagtgtcctctacgcgtggaggcagtggtgtcttcacactcgaagatttcgttggggactggcgacagacagccggctacaacctggaccaagtccttgaacagggaggtgtgtccagtttgtttcagaatctcggggtgtccgtaactccgatccaaaggattgtcctgagcggtgaaaatgggctgaagatcgacatccatgtcatcatcccgtatgaaggtctgagcggcgaccaaatgggccagatcgaaaaaatttttaaggtggtgtaccctgtggatgatcatcactttaaggtgatcctgcactatggcacactggtaatcgacggggttacgccgaacatgatcgactatttcggacggccctatgaaggcatcgccgtgttcgacggcaaaaagatcactgtaacagggaccctgtggaacggcaacaaaattatcgacgagcgcctgatcaaccccgacggctccctgctgttccgagtaaccatcaacggagtgaccggctggcggctgtgcgaacgcattctggcgctcgagggaggcagctggagccaccctcagtttgaaaaagactacaaagacgatgacgataagggatcagattacaaggatgatgatgacaaggggtcagattataaagacgacgatgataaagggagcgactacaaggacgacgatgacaaggcctggtcccatccccagttcgagaaacaccatcaccaccaccatcatcacactagtggctccggcgagggcagaggaagtctactaacctgcggagatgtggaagaaaatcctggcccacatatgaccgagtacaagcccacggtgcgcctcgccacccgcgacgacgtccccagggccgtacgcaccctcgccgccgcgttcgccgactaccccgccacgcgccacaccgtcgatccggaccgccacatcgagcgggtcaccgagctgcaagaactcttcctcacgcgcgtcgggctcgacatcggcaaggtgtgggtcgcggacgacggcgccgcggtggcggtctggaccacgccggagagcgtcgaagcgggggcggtgttcgccgagatcggcccgcgcatggccgagttgagcggttcccggctggccgcgcagcaacagatggaaggcctcctggcgccgcaccggcccaaggagcccgcgtggttcctggccaccgtcggcgtctcgcccgaccaccagggcaagggtctgggcagcgccgtcgtgctccccggagtggaggcggccgagcgcgccggggtgcccgccttcctggagacctccgcgccccgcaacctccccttctacgagcggctcggcttcaccgtcaccgccgacgtcgaggtgcccgaaggaccgcgcacctggtgcatgacccgcaagcccggtgcctga

SEQ ID NO: 9029 - DNA, 1821 bp, synthetic construct
  source 1..1821: mol_type = other DNA
atggccttaccagtgaccgccttgctcctgccgctggccttgctgctccacgccgccaggccgcaagtgcaactggttgaatccggtggcggcctggtgcaagcaggcggatctctcagacttagctgtgccgcctccggcagaaccttcacaatgggatggtttaggcaggctccagggaaagagagagagttcgtcgccgccatctctctgtctcccacactggcctactacgccgactctgtgagaggccggttcaccatctccagagataatgccaagaacaccgtgtacctgcaaatgaactctctgaaacccgaggatacagccgtgtactattgtgccgctgaccggaagtccgtgatgagcatcagacccgattactggggacagggcacacaagtcacagtgtcctctacgcgtggaggcagtggtgtcttcacactcgaagatttcgttggggactggcgacagacagccggctacaacctggaccaagtccttgaacagggaggtgtgtccagtttgtttcagaatctcggggtgtccgtaactccgatccaaaggattgtcctgagcggtgaaaatgggctgaagatcgacatccatgtcatcatcccgtatgaaggtctgagcggcgaccaaatgggccagatcgaaaaaatttttaaggtggtgtaccctgtggatgatcatcactttaaggtgatcctgcactatggcacactggtaatcgacggggttacgccgaacatgatcgactatttcggacggccctatgaaggcatcgccgtgttcgacggcaaaaagatcactgtaacagggaccctgtggaacggcaacaaaattatcgacgagcgcctgatcaaccccgacggctccctgctgttccgagtaaccatcaacggagtgaccggctggcggctgtgcgaacgcattctggcgctcgagggaggcagctggagccaccctcagtttgaaaaagactacaaagacgatgacgataagggatcagattacaaggatgatgatgacaaggggtcagattataaagacgacgatgataaagggagcgactacaaggacgacgatgacaaggcctggtcccatccccagttcgagaaacaccatcaccaccaccatcatcacactagtggctccggcgagggcagaggaagtctactaacctgcggagatgtggaagaaaatcctggcccacatatgaccgagtacaagcccacggtgcgcctcgccacccgcgacgacgtccccagggccgtacgcaccctcgccgccgcgttcgccgactaccccgccacgcgccacaccgtcgatccggaccgccacatcgagcgggtcaccgagctgcaagaactcttcctcacgcgcgtcgggctcgacatcggcaaggtgtgggtcgcggacgacggcgccgcggtggcggtctggaccacgccggagagcgtcgaagcgggggcggtgttcgccgagatcggcccgcgcatggccgagttgagcggttcccggctggccgcgcagcaacagatggaaggcctcctggcgccgcaccggcccaaggagcccgcgtggttcctggccaccgtcggcgtctcgcccgaccaccagggcaagggtctgggcagcgccgtcgtgctccccggagtggaggcggccgagcgcgccggggtgcccgccttcctggagacctccgcgccccgcaacctccccttctacgagcggctcggcttcaccgtcaccgccgacgtcgaggtgcccgaaggaccgcgcacctggtgcatgacccgcaagcccggtgcctga

SEQ ID NO: 9030 - DNA, 1821 bp, synthetic construct
  source 1..1821: mol_type = other DNA
atggccttaccagtgaccgccttgctcctgccgctggccttgctgctccacgccgccaggccgcaagtgcaactggttgaatccggtggcggcctggtgcaagcaggcggatctctcagacttagctgtgccgcctccggcagaaccttctctatgggatggtttaggcaggctccagggaaagagagagagttcgtcgccgccatctctctgtctcccacactggcctactacgccgactctgtgagaggccggttcaccatctccagagataatgccaagaacaccgtgtacctgcaaatgaactctctgaaacccgaggatacagccgtgtactattgtgccgctgaccggaagtccgtgatgagcatcagacccgattactggggacagggcacacaagtcacagtgtcctctacgcgtggaggcagtggtgtcttcacactcgaagatttcgttggggactggcgacagacagccggctacaacctggaccaagtccttgaacagggaggtgtgtccagtttgtttcagaatctcggggtgtccgtaactccgatccaaaggattgtcctgagcggtgaaaatgggctgaagatcgacatccatgtcatcatcccgtatgaaggtctgagcggcgaccaaatgggccagatcgaaaaaatttttaaggtggtgtaccctgtggatgatcatcactttaaggtgatcctgcactatggcacactggtaatcgacggggttacgccgaacatgatcgactatttcggacggccctatgaaggcatcgccgtgttcgacggcaaaaagatcactgtaacagggaccctgtggaacggcaacaaaattatcgacgagcgcctgatcaaccccgacggctccctgctgttccgagtaaccatcaacggagtgaccggctggcggctgtgcgaacgcattctggcgctcgagggaggcagctggagccaccctcagtttgaaaaagactacaaagacgatgacgataagggatcagattacaaggatgatgatgacaaggggtcagattataaagacgacgatgataaagggagcgactacaaggacgacgatgacaaggcctggtcccatccccagttcgagaaacaccatcaccaccaccatcatcacactagtggctccggcgagggcagaggaagtctactaacctgcggagatgtggaagaaaatcctggcccacatatgaccgagtacaagcccacggtgcgcctcgccacccgcgacgacgtccccagggccgtacgcaccctcgccgccgcgttcgccgactaccccgccacgcgccacaccgtcgatccggaccgccacatcgagcgggtcaccgagctgcaagaactcttcctcacgcgcgtcgggctcgacatcggcaaggtgtgggtcgcggacgacggcgccgcggtggcggtctggaccacgccggagagcgtcgaagcgggggcggtgttcgccgagatcggcccgcgcatggccgagttgagcggttcccggctggccgcgcagcaacagatggaaggcctcctggcgccgcaccggcccaaggagcccgcgtggttcctggccaccgtcggcgtctcgcccgaccaccagggcaagggtctgggcagcgccgtcgtgctccccggagtggaggcggccgagcgcgccggggtgcccgccttcctggagacctccgcgccccgcaacctccccttctacgagcggctcggcttcaccgtcaccgccgacgtcgaggtgcccgaaggaccgcgcacctggtgcatgacccgcaagcccggtgcctga

SEQ ID NO: 9031 - DNA, 1821 bp, synthetic construct
  source 1..1821: mol_type = other DNA
atggccttaccagtgaccgccttgctcctgccgctggccttgctgctccacgccgccaggccgcaagtgcaactggttgaatccggtggcggcctggtgcaagcaggcggatctctcagacttagctgtgccgcctccggcagaaccttctctatgggatggtttaggcaggctccagggaaagagagagagttcgtcgccgccatcaccctgtctcccacactggcctactacgccgactctgtgagaggccggttcaccatctccagagataatgccaagaacaccgtgtacctgcaaatgaactctctgaaacccgaggatacagccgtgtactattgtgccgctgaccggaagtccgtgatgagcatcagacccgattactggggacagggcacacaagtcacagtgtcctctacgcgtggaggcagtggtgtcttcacactcgaagatttcgttggggactggcgacagacagccggctacaacctggaccaagtccttgaacagggaggtgtgtccagtttgtttcagaatctcggggtgtccgtaactccgatccaaaggattgtcctgagcggtgaaaatgggctgaagatcgacatccatgtcatcatcccgtatgaaggtctgagcggcgaccaaatgggccagatcgaaaaaatttttaaggtggtgtaccctgtggatgatcatcactttaaggtgatcctgcactatggcacactggtaatcgacggggttacgccgaacatgatcgactatttcggacggccctatgaaggcatcgccgtgttcgacggcaaaaagatcactgtaacagggaccctgtggaacggcaacaaaattatcgacgagcgcctgatcaaccccgacggctccctgctgttccgagtaaccatcaacggagtgaccggctggcggctgtgcgaacgcattctggcgctcgagggaggcagctggagccaccctcagtttgaaaaagactacaaagacgatgacgataagggatcagattacaaggatgatgatgacaaggggtcagattataaagacgacgatgataaagggagcgactacaaggacgacgatgacaaggcctggtcccatccccagttcgagaaacaccatcaccaccaccatcatcacactagtggctccggcgagggcagaggaagtctactaacctgcggagatgtggaagaaaatcctggcccacatatgaccgagtacaagcccacggtgcgcctcgccacccgcgacgacgtccccagggccgtacgcaccctcgccgccgcgttcgccgactaccccgccacgcgccacaccgtcgatccggaccgccacatcgagcgggtcaccgagctgcaagaactcttcctcacgcgcgtcgggctcgacatcggcaaggtgtgggtcgcggacgacggcgccgcggtggcggtctggaccacgccggagagcgtcgaagcgggggcggtgttcgccgagatcggcccgcgcatggccgagttgagcggttcccggctggccgcgcagcaacagatggaaggcctcctggcgccgcaccggcccaaggagcccgcgtggttcctggccaccgtcggcgtctcgcccgaccaccagggcaagggtctgggcagcgccgtcgtgctccccggagtggaggcggccgagcgcgccggggtgcccgccttcctggagacctccgcgccccgcaacctccccttctacgagcggctcggcttcaccgtcaccgccgacgtcgaggtgcccgaaggaccgcgcacctggtgcatgacccgcaagcccggtgcctga

SEQ ID NO: 9032 - DNA, 1821 bp, synthetic construct
  source 1..1821: mol_type = other DNA
atggccttaccagtgaccgccttgctcctgccgctggccttgctgctccacgccgccaggccgcaagtgcaactgcaagaatccggtggcggcctggcacaagcaggcggatctctcagacttagctgtgccgcctccggcagaaccttctctatgggatggtttaggcaggctccagggaaagagagagagttcgtcgccgccatcaccctgtctcccacactggcctactacgccgactctgtgagaggccggttcaccatctccagagataatgccaagaacaccgtgtacctgcaaatgaactctctgaaacccgaggatacagccgtgtactattgtgccgctgaccggaagtccgtgatgagcatcagacccgattactggggacagggcacacaagtcacagtgtcctctacgcgtggaggcagtggtgtcttcacactcgaagatttcgttggggactggcgacagacagccggctacaacctggaccaagtccttgaacagggaggtgtgtccagtttgtttcagaatctcggggtgtccgtaactccgatccaaaggattgtcctgagcggtgaaaatgggctgaagatcgacatccatgtcatcatcccgtatgaaggtctgagcggcgaccaaatgggccagatcgaaaaaatttttaaggtggtgtaccctgtggatgatcatcactttaaggtgatcctgcactatggcacactggtaatcgacggggttacgccgaacatgatcgactatttcggacggccctatgaaggcatcgccgtgttcgacggcaaaaagatcactgtaacagggaccctgtggaacggcaacaaaattatcgacgagcgcctgatcaaccccgacggctccctgctgttccgagtaaccatcaacggagtgaccggctggcggctgtgcgaacgcattctggcgctcgagggaggcagctggagccaccctcagtttgaaaaagactacaaagacgatgacgataagggatcagattacaaggatgatgatgacaaggggtcagattataaagacgacgatgataaagggagcgactacaaggacgacgatgacaaggcctggtcccatccccagttcgagaaacaccatcaccaccaccatcatcacactagtggctccggcgagggcagaggaagtctactaacctgcggagatgtggaagaaaatcctggcccacatatgaccgagtacaagcccacggtgcgcctcgccacccgcgacgacgtccccagggccgtacgcaccctcgccgccgcgttcgccgactaccccgccacgcgccacaccgtcgatccggaccgccacatcgagcgggtcaccgagctgcaagaactcttcctcacgcgcgtcgggctcgacatcggcaaggtgtgggtcgcggacgacggcgccgcggtggcggtctggaccacgccggagagcgtcgaagcgggggcggtgttcgccgagatcggcccgcgcatggccgagttgagcggttcccggctggccgcgcagcaacagatggaaggcctcctggcgccgcaccggcccaaggagcccgcgtggttcctggccaccgtcggcgtctcgcccgaccaccagggcaagggtctgggcagcgccgtcgtgctccccggagtggaggcggccgagcgcgccggggtgcccgccttcctggagacctccgcgccccgcaacctccccttctacgagcggctcggcttcaccgtcaccgccgacgtcgaggtgcccgaaggaccgcgcacctggtgcatgacccgcaagcccggtgcctga

SEQ ID NO: 9033 - DNA, 1821 bp, synthetic construct
  source 1..1821: mol_type = other DNA
atggccttaccagtgaccgccttgctcctgccgctggccttgctgctccacgccgccaggccgcaagtgcaactggttgaatccggtggcggcctggcacaaccaggcggatctctcagacttagctgtgccgcctccggcagaaccttctctatgggatggtttaggcaggctccagggaaagagagagagttcgtcgccgccatcaccctgtctcccacactggcctactacgccgactctgtgagaggccggttcaccatctccagagataatgccaagaacaccgtgtacctgcaaatgaactctctgaaacccgaggatacagccgtgtactattgtgccgctgaccggaagtccgtgatgagcatcagacccgattactggggacagggcacacaagtcacagtgtcctctacgcgtggaggcagtggtgtcttcacactcgaagatttcgttggggactggcgacagacagccggctacaacctggaccaagtccttgaacagggaggtgtgtccagtttgtttcagaatctcggggtgtccgtaactccgatccaaaggattgtcctgagcggtgaaaatgggctgaagatcgacatccatgtcatcatcccgtatgaaggtctgagcggcgaccaaatgggccagatcgaaaaaatttttaaggtggtgtaccctgtggatgatcatcactttaaggtgatcctgcactatggcacactggtaatcgacggggttacgccgaacatgatcgactatttcggacggccctatgaaggcatcgccgtgttcgacggcaaaaagatcactgtaacagggaccctgtggaacggcaacaaaattatcgacgagcgcctgatcaaccccgacggctccctgctgttccgagtaaccatcaacggagtgaccggctggcggctgtgcgaacgcattctggcgctcgagggaggcagctggagccaccctcagtttgaaaaagactacaaagacgatgacgataagggatcagattacaaggatgatgatgacaaggggtcagattataaagacgacgatgataaagggagcgactacaaggacgacgatgacaaggcctggtcccatccccagttcgagaaacaccatcaccaccaccatcatcacactagtggctccggcgagggcagaggaagtctactaacctgcggagatgtggaagaaaatcctggcccacatatgaccgagtacaagcccacggtgcgcctcgccacccgcgacgacgtccccagggccgtacgcaccctcgccgccgcgttcgccgactaccccgccacgcgccacaccgtcgatccggaccgccacatcgagcgggtcaccgagctgcaagaactcttcctcacgcgcgtcgggctcgacatcggcaaggtgtgggtcgcggacgacggcgccgcggtggcggtctggaccacgccggagagcgtcgaagcgggggcggtgttcgccgagatcggcccgcgcatggccgagttgagcggttcccggctggccgcgcagcaacagatggaaggcctcctggcgccgcaccggcccaaggagcccgcgtggttcctggccaccgtcggcgtctcgcccgaccaccagggcaagggtctgggcagcgccgtcgtgctccccggagtggaggcggccgagcgcgccggggtgcccgccttcctggagacctccgcgccccgcaacctccccttctacgagcggctcggcttcaccgtcaccgccgacgtcgaggtgcccgaaggaccgcgcacctggtgcatgacccgcaagcccggtgcctga

SEQ ID NO: 9034 - DNA, 2202 bp, synthetic construct
  source 1..2202: mol_type = other DNA
atggccttaccagtgaccgccttgctcctgccgctggccttgctgctccacgccgccaggccgagctacgtgctgacacagcctccatccgtgtctgtggctccaggacagaccgccagaatcacatgcggcggcaacaacatcggcagcaagagcgtgcactggtatcagcagccacctggacaggctccagtggtggtggtgtacgacgacagcgatagacctagcggcatccccgagagattcagcggcagcaattccggcaataccgccacactgaccatcagcagagtggaagctggcgacgaggccgtgtactactgccaagtgtgggacagcagcagcgatcacgtggtgtttggcggcggaacaaagctgacagtgcttggcggaggcggatctggcggcggaggtagcggtggcggaggatctcaactccagctgcaagagtctggccctggcctggtcaagcctagcgaaacactgagcctgacctgtaccgtgtctggcggctctatcagctccggcagctatttctggggctggatcagacaacctcctggcaaaggactggaatggatcggctccatctactacagcggcatcacctactacaaccccagcctgaagtccagagtgaccatctccgtggacaccagcaagaaccagttctccctgaagctgagcagcgtgacagccgccgataccgccgtgtattattgtgccagacatgacggcgctgtggccggcctgtttgattattggggacagggcaccctggtcaccgtgtcatctgctacgcgtggaggcagtggtgtcttcacactcgaagatttcgttggggactggcgacagacagccggctacaacctggaccaagtccttgaacagggaggtgtgtccagtttgtttcagaatctcggggtgtccgtaactccgatccaaaggattgtcctgagcggtgaaaatgggctgaagatcgacatccatgtcatcatcccgtatgaaggtctgagcggcgaccaaatgggccagatcgaaaaaatttttaaggtggtgtaccctgtggatgatcatcactttaaggtgatcctgcactatggcacactggtaatcgacggggttacgccgaacatgatcgactatttcggacggccctatgaaggcatcgccgtgttcgacggcaaaaagatcactgtaacagggaccctgtggaacggcaacaaaattatcgacgagcgcctgatcaaccccgacggctccctgctgttccgagtaaccatcaacggagtgaccggctggcggctgtgcgaacgcattctggcgctcgagggaggcagctggagccaccctcagtttgaaaaagactacaaagacgatgacgataagggatcagattacaaggatgatgatgacaaggggtcagattataaagacgacgatgataaagggagcgactacaaggacgacgatgacaaggcctggtcccatccccagttcgagaaacaccatcaccaccaccatcatcacactagtggctccggcgagggcagaggaagtctactaacctgcggagatgtggaagaaaatcctggcccacatatgaccgagtacaagcccacggtgcgcctcgccacccgcgacgacgtccccagggccgtacgcaccctcgccgccgcgttcgccgactaccccgccacgcgccacaccgtcgatccggaccgccacatcgagcgggtcaccgagctgcaagaactcttcctcacgcgcgtcgggctcgacatcggcaaggtgtgggtcgcggacgacggcgccgcggtggcggtctggaccacgccggagagcgtcgaagcgggggcggtgttcgccgagatcggcccgcgcatggccgagttgagcggttcccggctggccgcgcagcaacagatggaaggcctcctggcgccgcaccggcccaaggagcccgcgtggttcctggccaccgtcggcgtctcgcccgaccaccagggcaagggtctgggcagcgccgtcgtgctccccggagtggaggcggccgagcgcgccggggtgcccgccttcctggagacctccgcgccccgcaacctccccttctacgagcggctcggcttcaccgtcaccgccgacgtcgaggtgcccgaaggaccgcgcacctggtgcatgacccgcaagcccggtgcctga

SEQ ID NO: 9035 - DNA, 2199 bp, synthetic construct
  source 1..2199: mol_type = other DNA
atggccttaccagtgaccgccttgctcctgccgctggccttgctgctccacgccgccaggccgagctacgtgctgacacagcctccatccgtgtctgtggctccaggacagaccgccagaatcacatgcggcggcaacaacatcggcagccagagcgtgcactggtatcagcagaagcctggacaggctccagtgctggtggtgtacgacgacagcgatagacctagcggcatccccgagagattcagcggcagcaattccggcaataccgccacactgaccatcagcagagtggaagctggcgacgaggccgactactactgccaagtgtgggacagcagcagcgatcacgtggtgtttggcggcggaacaaagctgacagtgcttggcggaggcggatctggcggcggaggtagcggtggcggaggatctcaactccagctgcaagagtctggccctggcctggtcaagcctagcgaaacactgagcctgacctgtaccgtgtctggcggctctatcagctccaacagctatttctggggctggatcagacaacctcctggcaaaggactggaatggatcggctccatctactacagcggcagcacctactacaaccccaccctgaagtccagagtgaccatctccgtggacaccagcaagaaccagttctccctgaagctgagcagcgtgacagccgccgataccgccgtgtattattgtgccagacatgacggcgctgtggccggcctgtttgattattggggacagggcaccctggtcaccgtgtcatctacgcgtggaggcagtggtgtcttcacactcgaagatttcgttggggactggcgacagacagccggctacaacctggaccaagtccttgaacagggaggtgtgtccagtttgtttcagaatctcggggtgtccgtaactccgatccaaaggattgtcctgagcggtgaaaatgggctgaagatcgacatccatgtcatcatcccgtatgaaggtctgagcggcgaccaaatgggccagatcgaaaaaatttttaaggtggtgtaccctgtggatgatcatcactttaaggtgatcctgcactatggcacactggtaatcgacggggttacgccgaacatgatcgactatttcggacggccctatgaaggcatcgccgtgttcgacggcaaaaagatcactgtaacagggaccctgtggaacggcaacaaaattatcgacgagcgcctgatcaaccccgacggctccctgctgttccgagtaaccatcaacggagtgaccggctggcggctgtgcgaacgcattctggcgctcgagggaggcagctggagccaccctcagtttgaaaaagactacaaagacgatgacgataagggatcagattacaaggatgatgatgacaaggggtcagattataaagacgacgatgataaagggagcgactacaaggacgacgatgacaaggcctggtcccatccccagttcgagaaacaccatcaccaccaccatcatcacactagtggctccggcgagggcagaggaagtctactaacctgcggagatgtggaagaaaatcctggcccacatatgaccgagtacaagcccacggtgcgcctcgccacccgcgacgacgtccccagggccgtacgcaccctcgccgccgcgttcgccgactaccccgccacgcgccacaccgtcgatccggaccgccacatcgagcgggtcaccgagctgcaagaactcttcctcacgcgcgtcgggctcgacatcggcaaggtgtgggtcgcggacgacggcgccgcggtggcggtctggaccacgccggagagcgtcgaagcgggggcggtgttcgccgagatcggcccgcgcatggccgagttgagcggttcccggctggccgcgcagcaacagatggaaggcctcctggcgccgcaccggcccaaggagcccgcgtggttcctggccaccgtcggcgtctcgcccgaccaccagggcaagggtctgggcagcgccgtcgtgctccccggagtggaggcggccgagcgcgccggggtgcccgccttcctggagacctccgcgccccgcaacctccccttctacgagcggctcggcttcaccgtcaccgccgacgtcgaggtgcccgaaggaccgcgcacctggtgcatgacccgcaagcccggtgcctga

SEQ ID NO: 9036 - DNA, 2199 bp, synthetic construct
  source 1..2199: mol_type = other DNA
atggccttaccagtgaccgccttgctcctgccgctggccttgctgctccacgctgccaggccgagctacgtgctgacacagcctccatccgtgtctgtggctccaggacagaccgccagaatcacatgcggcggcaacaacatcggcagcaagggcgtgcactggtatcagcagaagcctggacaggctccagtgctggtggtgtacgacgacagcgatagacctagcggcatccccgagagattcagcggcagcaattccggcaataccgccacactgaccatcagcagagtggaagctggcgacgaggccgactactactgccaagtgtgggacagcagcagcgatcacgtggtgtttggcggcggaacaaagctgacagtgcttggcggaggcggatctggcggcggaggtagcggtggcggaggatctcaactccagctgcaagagtctggccctggcctggtcaagcctagcgaaacactgagcctgacctgtaccgtgtctggcggctctatcagctccaacagctattattggggctggatcagacaacctcctggcaaaggactggaatggatcggctccatctactacagcggcagcacctactacaaccccaccctgaagtccagagtgaccatctccgtggacaccagcaagaaccagttctccctgaagctgagcagcgtgacagccgccgataccgccgtgtattattgtgccagacatgacggcgctgtggccggcctgtttgattattggggacagggcaccctggtcaccgtgtcatctacgcgtggaggcagtggtgtcttcacactcgaagatttcgttggggactggcgacagacagccggctacaacctggaccaagtccttgaacagggaggtgtgtccagtttgtttcagaatctcggggtgtccgtaactccgatccaaaggattgtcctgagcggtgaaaatgggctgaagatcgacatccatgtcatcatcccgtatgaaggtctgagcggcgaccaaatgggccagatcgaaaaaatttttaaggtggtgtaccctgtggatgatcatcactttaaggtgatcctgcactatggcacactggtaatcgacggggttacgccgaacatgatcgactatttcggacggccctatgaaggcatcgccgtgttcgacggcaaaaagatcactgtaacagggaccctgtggaacggcaacaaaattatcgacgagcgcctgatcaaccccgacggctccctgctgttccgagtaaccatcaacggagtgaccggctggcggctgtgcgaacgcattctggcgctcgagggaggcagctggagccaccctcagtttgaaaaagactacaaagacgatgacgataagggatcagattacaaggatgatgatgacaaggggtcagattataaagacgacgatgataaagggagcgactacaaggacgacgatgacaaggcctggtcccatccccagttcgagaaacaccatcaccaccaccatcatcacactagtggctccggcgagggcagaggaagtctactaacctgcggagatgtggaagaaaatcctggcccacatatgaccgagtacaagcccacggtgcgcctcgccacccgcgacgacgtccccagggccgtacgcaccctcgccgccgcgttcgccgactaccccgccacgcgccacaccgtcgatccggaccgccacatcgagcgggtcaccgagctgcaagaactcttcctcacgcgcgtcgggctcgacatcggcaaggtgtgggtcgcggacgacggcgccgcggtggcggtctggaccacgccggagagcgtcgaagcgggggcggtgttcgccgagatcggcccgcgcatggccgagttgagcggttcccggctggccgcgcagcaacagatggaaggcctcctggcgccgcaccggcccaaggagcccgcgtggttcctggccaccgtcggcgtctcgcccgaccaccagggcaagggtctgggcagcgccgtcgtgctccccggagtggaggcggccgagcgcgccggggtgcccgccttcctggagacctccgcgccccgcaacctccccttctacgagcggctcggcttcaccgtcaccgccgacgtcgaggtgcccgaaggaccgcgcacctggtgcatgacccgcaagcccggtgcctga

SEQ ID NO: 9037 - DNA, 1821 bp, synthetic construct
  source 1..1821: mol_type = other DNA
atggccttaccagtgaccgccttgctcctgccgctggccttgctgctccacgccgccaggccggaagtgcaactggttgaatccggtggcggcctggtgcaagcaggcggatctctcagacttagctgtgccgcctccggcagaaccttcacaatgggatggtttaggcaggctccagggaaagagagagagttcgtcgccgccatctctctgtctcccacactggcctactacgccgagtctgtgagaggccggttcaccatctccagagataatgccaagaacaccgtggtgctgcaaatgaactctctgaaacccgaggatacagccctgtactattgtgccgctgaccggaagtccgtgatgagcatcagacccgattactggggacagggcacacaagtcacagtgtcctctacgcgtggaggcagtggtgtcttcacactcgaagatttcgttggggactggcgacagacagccggctacaacctggaccaagtccttgaacagggaggtgtgtccagtttgtttcagaatctcggggtgtccgtaactccgatccaaaggattgtcctgagcggtgaaaatgggctgaagatcgacatccatgtcatcatcccgtatgaaggtctgagcggcgaccaaatgggccagatcgaaaaaatttttaaggtggtgtaccctgtggatgatcatcactttaaggtgatcctgcactatggcacactggtaatcgacggggttacgccgaacatgatcgactatttcggacggccctatgaaggcatcgccgtgttcgacggcaaaaagatcactgtaacagggaccctgtggaacggcaacaaaattatcgacgagcgcctgatcaaccccgacggctccctgctgttccgagtaaccatcaacggagtgaccggctggcggctgtgcgaacgcattctggcgctcgagggaggcagctggagccaccctcagtttgaaaaagactacaaagacgatgacgataagggatcagattacaaggatgatgatgacaaggggtcagattataaagacgacgatgataaagggagcgactacaaggacgacgatgacaaggcctggtcccatccccagttcgagaaacaccatcaccaccaccatcatcacactagtggctccggcgagggcagaggaagtctactaacctgcggagatgtggaagaaaatcctggcccacatatgaccgagtacaagcccacggtgcgcctcgccacccgcgacgacgtccccagggccgtacgcaccctcgccgccgcgttcgccgactaccccgccacgcgccacaccgtcgatccggaccgccacatcgagcgggtcaccgagctgcaagaactcttcctcacgcgcgtcgggctcgacatcggcaaggtgtgggtcgcggacgacggcgccgcggtggcggtctggaccacgccggagagcgtcgaagcgggggcggtgttcgccgagatcggcccgcgcatggccgagttgagcggttcccggctggccgcgcagcaacagatggaaggcctcctggcgccgcaccggcccaaggagcccgcgtggttcctggccaccgtcggcgtctcgcccgaccaccagggcaagggtctgggcagcgccgtcgtgctccccggagtggaggcggccgagcgcgccggggtgcccgccttcctggagacctccgcgccccgcaacctccccttctacgagcggctcggcttcaccgtcaccgccgacgtcgaggtgcccgaaggaccgcgcacctggtgcatgacccgcaagcccggtgcctga

SEQ ID NO: 9038 - DNA, 1821 bp, synthetic construct
  source 1..1821: mol_type = other DNA
atggccttaccagtgaccgccttgctcctgccgctggccttgctgctccacgccgccaggccggaagtgcaactggttgaatccggtggcggcctggtgcaagcaggcggatctctcagacttagctgtgccgcctccggcagaaccttcacaatgggatggtttaggcaggctccagggaaagagagagagttcgtcgccgccatctctctgtctcccacactggcctactacgccgagtctgtgagaggccggttcaccatctccagagataatgccaagaacaccgtggtgctgcaaatgaactctctgagagccgaggatacagccgtgtactattgtgccgctgaccggaagtccgtgatgagcatcagacccgattactggggacagggcacacaagtcacagtgtcctctacgcgtggaggcagtggtgtcttcacactcgaagatttcgttggggactggcgacagacagccggctacaacctggaccaagtccttgaacagggaggtgtgtccagtttgtttcagaatctcggggtgtccgtaactccgatccaaaggattgtcctgagcggtgaaaatgggctgaagatcgacatccatgtcatcatcccgtatgaaggtctgagcggcgaccaaatgggccagatcgaaaaaatttttaaggtggtgtaccctgtggatgatcatcactttaaggtgatcctgcactatggcacactggtaatcgacggggttacgccgaacatgatcgactatttcggacggccctatgaaggcatcgccgtgttcgacggcaaaaagatcactgtaacagggaccctgtggaacggcaacaaaattatcgacgagcgcctgatcaaccccgacggctccctgctgttccgagtaaccatcaacggagtgaccggctggcggctgtgcgaacgcattctggcgctcgagggaggcagctggagccaccctcagtttgaaaaagactacaaagacgatgacgataagggatcagattacaaggatgatgatgacaaggggtcagattataaagacgacgatgataaagggagcgactacaaggacgacgatgacaaggcctggtcccatccccagttcgagaaacaccatcaccaccaccatcatcacactagtggctccggcgagggcagaggaagtctactaacctgcggagatgtggaagaaaatcctggcccacatatgaccgagtacaagcccacggtgcgcctcgccacccgcgacgacgtccccagggccgtacgcaccctcgccgccgcgttcgccgactaccccgccacgcgccacaccgtcgatccggaccgccacatcgagcgggtcaccgagctgcaagaactcttcctcacgcgcgtcgggctcgacatcggcaaggtgtgggtcgcggacgacggcgccgcggtggcggtctggaccacgccggagagcgtcgaagcgggggcggtgttcgccgagatcggcccgcgcatggccgagttgagcggttcccggctggccgcgcagcaacagatggaaggcctcctggcgccgcaccggcccaaggagcccgcgtggttcctggccaccgtcggcgtctcgcccgaccaccagggcaagggtctgggcagcgccgtcgtgctccccggagtggaggcggccgagcgcgccggggtgcccgccttcctggagacctccgcgccccgcaacctccccttctacgagcggctcggcttcaccgtcaccgccgacgtcgaggtgcccgaaggaccgcgcacctggtgcatgacccgcaagcccggtgcctga

SEQ ID NO: 9039 - DNA, 1098 bp, synthetic construct
  source 1..1098: mol_type = other DNA
atggccctgcctgtgacagctctgctgctgcctctggcactgctgctgcacgccgccagacctcaagtgaagctggaagagtctggcggaggactggtgcaggctggaagaagcctgagactgtcttgtgccgccagcgagcacacctttagctctcacgtgatgggctggttcagacaggcccctggcaaagaaagggaaagcgtggccgttatcggctggcgggatattagcaccagctacgccgatagcgtgaagggcagattcaccatcagccgggacaacgccaagaaaaccctgtacctccagatgaacagcctgaagccagaggacaccgccgtgtactactgcgccgccagaagaattgacgccgccgactacgattcttggggccagggaacccaagtgaccgtttctagcacgcgtaccacgacgccagcgccgcgaccaccaacaccggcgcccaccatcgcgtcgcagcccctgtccctgcgcccagaggcgtgccggccagcggcggggggcgcagtgcacacgagggggctggacttcgcctgtgacatctacatctgggcgcccttggccgggacttgtggggtccttctcctgtcactggttatcaccctttactgcaaacggggcagaaagaaactcctgtatatattcaaacaaccatttatgagaccagtacaaactactcaagaggaagatggctgtagctgccgatttccagaagaagaagaaggaggatgtgaactgagagtgaagttcagcaggagcgcagacgcccccgcgtaccagcagggccagaaccagctctataacgagctgaatctaggacgaagagaggagtacgatgttttggacaagagacgtggccgggaccctgagatggggggaaagccgagaaggaagaaccctcaggaaggcctgtacaatgaactgcagaaagataagatggcggaggcctacagtgagattgggatgaaaggcgagcgccggaggggcaaggggcacgatggcctttaccagggtctcagtacagccaccaaggacacctacgacgcccttcacatgcaggccctgccccctcgctaa

SEQ ID NO: 9040 - DNA, 1098 bp, synthetic construct
  source 1..1098: mol_type = other DNA
atggccttaccagtgaccgccttgctcctgccgctggccttgctgctccacgccgccaggccgttcgaagtgcaactggttgaatccggtggcggcctggtgcaagcaggcggatctctcagacttagctgtgccgcctccggcagaaccttcacaatgggatggtttaggcaggctccagggaaagagagagagttcgtcgccgccatcaatctgtctcccacactggcctactacgccgagtctgtgaaaggccggttcaccatctccagagataatgccaagaacaccgtggtgctgcaaatgaactctctgaaacccgaggatacagccctgtactattgtgccgctgaccggaagtccgtgatgagcatcagacccgattactggggacagggcacacaagtcacagtgtcctctacgcgtaccacgacgccagcgccgcgaccaccaacaccggcgcccaccatcgcgtcgcagcccctgtccctgcgcccagaggcgtgccggccagcggcggggggcgcagtgcacacgagggggctggacttcgcctgtgacatctacatctgggcgcccttggccgggacttgtggggtccttctcctgtcactggttatcaccctttactgcaaacggggcagaaagaaactcctgtatatattcaaacaaccatttatgagaccagtacaaactactcaagaggaagatggctgtagctgccgatttccagaagaagaagaaggaggatgtgaactgagagtgaagttcagcaggagcgcagacgcccccgcgtaccagcagggccagaaccagctctataacgagctgaatctaggacgaagagaggagtacgatgttttggacaagagacgtggccgggaccctgagatggggggaaagccgagaaggaagaaccctcaggaaggcctgtacaatgaactgcagaaagataagatggcggaggcctacagtgagattgggatgaaaggcgagcgccggaggggcaaggggcacgatggcctttaccagggtctcagtacagccaccaaggacacctacgacgcccttcacatgcaggccctgccccctcgctaa

SEQ ID NO: 9041 - DNA, 1098 bp, synthetic construct
  source 1..1098: mol_type = other DNA
atggccttaccagtgaccgccttgctcctgccgctggccttgctgctccacgccgccaggccgttcgaagtgcaactggttgaatccggtggcggcctggtgcaagcaggcggatctctcagacttagctgtgccgcctccggcagaaccttcacaatgggatggtttaggcaggctccagggaaagagagagagttcgtcgccgccatctctctgtctcccacactggcctactacgccgagtctgtgaaaggccggttcaccatctccagagataatgccaagaacaccgtggtgctgcaaatgaactctctgaaacccgaggatacagccctgtactattgtgccgctgaccggaagtccgtgatggccatcagacccgattactggggacagggcacacaagtcacagtgtcctctacgcgtaccacgacgccagcgccgcgaccaccaacaccggcgcccaccatcgcgtcgcagcccctgtccctgcgcccagaggcgtgccggccagcggcggggggcgcagtgcacacgagggggctggacttcgcctgtgacatctacatctgggcgcccttggccgggacttgtggggtccttctcctgtcactggttatcaccctttactgcaaacggggcagaaagaaactcctgtatatattcaaacaaccatttatgagaccagtacaaactactcaagaggaagatggctgtagctgccgatttccagaagaagaagaaggaggatgtgaactgagagtgaagttcagcaggagcgcagacgcccccgcgtaccagcagggccagaaccagctctataacgagctgaatctaggacgaagagaggagtacgatgttttggacaagagacgtggccgggaccctgagatggggggaaagccgagaaggaagaaccctcaggaaggcctgtacaatgaactgcagaaagataagatggcggaggcctacagtgagattgggatgaaaggcgagcgccggaggggcaaggggcacgatggcctttaccagggtctcagtacagccaccaaggacacctacgacgcccttcacatgcaggccctgccccctcgctaa

SEQ ID NO: 9042 - DNA, 1098 bp, synthetic construct
  source 1..1098: mol_type = other DNA
atggccttaccagtgaccgccttgctcctgccgctggccttgctgctccacgccgccaggccgttcgaagtgcaactggttgaatccggtggcggcctggtgcaagcaggcggatctctcagacttagctgtgccgcctccggcagaaccttcacaatgggatggtttaggcaggctccagggaaagagagagagttcgtcgccgccatctctctgtctcccacactggcctactacgccgagtctgtgaaaggccggttcaccatctccagagataatgccaagaacaccgtggtgctgcaaatgaactctctgaaacccgaggatacagccctgtactattgtgccgctgagcggaagtccgtgatgagcatcagacccgattactggggacagggcacacaagtcacagtgtcctctacgcgtaccacgacgccagcgccgcgaccaccaacaccggcgcccaccatcgcgtcgcagcccctgtccctgcgcccagaggcgtgccggccagcggcggggggcgcagtgcacacgagggggctggacttcgcctgtgacatctacatctgggcgcccttggccgggacttgtggggtccttctcctgtcactggttatcaccctttactgcaaacggggcagaaagaaactcctgtatatattcaaacaaccatttatgagaccagtacaaactactcaagaggaagatggctgtagctgccgatttccagaagaagaagaaggaggatgtgaactgagagtgaagttcagcaggagcgcagacgcccccgcgtaccagcagggccagaaccagctctataacgagctgaatctaggacgaagagaggagtacgatgttttggacaagagacgtggccgggaccctgagatggggggaaagccgagaaggaagaaccctcaggaaggcctgtacaatgaactgcagaaagataagatggcggaggcctacagtgagattgggatgaaaggcgagcgccggaggggcaaggggcacgatggcctttaccagggtctcagtacagccaccaaggacacctacgacgcccttcacatgcaggccctgccccctcgctaa

SEQ ID NO: 9043 - DNA, 1098 bp, synthetic construct
  source 1..1098: mol_type = other DNA
atggccttaccagtgaccgccttgctcctgccgctggccttgctgctccacgccgccaggccgttcgaagtgcaactggttgaatccggtggcggcctggtgcaagcaggcggatctctcagacttagctgtgccgcctccggcagaaccttcacaatgggatggtttaggcaggctccagggaaagagagagagttcgtcgccgccatcaatctgtctcccacactggcctactacgccgagtctgtgaaaggccggttcaccatctccagagataatgccaagaacaccgtggtgctgcaaatgaactctctgaaacccgaggatacagccctgtactattgtgccgctgagcggaagtccgtgatggccatcagacccgattactggggacagggcacacaagtcacagtgtcctctacgcgtaccacgacgccagcgccgcgaccaccaacaccggcgcccaccatcgcgtcgcagcccctgtccctgcgcccagaggcgtgccggccagcggcggggggcgcagtgcacacgagggggctggacttcgcctgtgacatctacatctgggcgcccttggccgggacttgtggggtccttctcctgtcactggttatcaccctttactgcaaacggggcagaaagaaactcctgtatatattcaaacaaccatttatgagaccagtacaaactactcaagaggaagatggctgtagctgccgatttccagaagaagaagaaggaggatgtgaactgagagtgaagttcagcaggagcgcagacgcccccgcgtaccagcagggccagaaccagctctataacgagctgaatctaggacgaagagaggagtacgatgttttggacaagagacgtggccgggaccctgagatggggggaaagccgagaaggaagaaccctcaggaaggcctgtacaatgaactgcagaaagataagatggcggaggcctacagtgagattgggatgaaaggcgagcgccggaggggcaaggggcacgatggcctttaccagggtctcagtacagccaccaaggacacctacgacgcccttcacatgcaggccctgccccctcgctaa

SEQ ID NO: 9044 - DNA, 1098 bp, synthetic construct
  source 1..1098: mol_type = other DNA
atggccttaccagtgaccgccttgctcctgccgctggccttgctgctccacgccgccaggccgttcgaagtgcaactggttgaatccggtggcggcctggtgcaagcaggcggatctctcagacttagctgtgccgcctccggcagaaccttcacaatgggatggtttaggcaggctccagggaaagagagagagttcgtcgccgccatcaatctgtctcccacactggcctactacgccgagtctgtgaaaggccggttcaccatctccagagataatgccaagaacaccgtggtgctgcaaatgaactctctgaaacccgaggatacagccctgtactattgtgccgctgaccggaagtccgtgatggccatcagacccgattactggggacagggcacacaagtcacagtgtcctctacgcgtaccacgacgccagcgccgcgaccaccaacaccggcgcccaccatcgcgtcgcagcccctgtccctgcgcccagaggcgtgccggccagcggcggggggcgcagtgcacacgagggggctggacttcgcctgtgacatctacatctgggcgcccttggccgggacttgtggggtccttctcctgtcactggttatcaccctttactgcaaacggggcagaaagaaactcctgtatatattcaaacaaccatttatgagaccagtacaaactactcaagaggaagatggctgtagctgccgatttccagaagaagaagaaggaggatgtgaactgagagtgaagttcagcaggagcgcagacgcccccgcgtaccagcagggccagaaccagctctataacgagctgaatctaggacgaagagaggagtacgatgttttggacaagagacgtggccgggaccctgagatggggggaaagccgagaaggaagaaccctcaggaaggcctgtacaatgaactgcagaaagataagatggcggaggcctacagtgagattgggatgaaaggcgagcgccggaggggcaaggggcacgatggcctttaccagggtctcagtacagccaccaaggacacctacgacgcccttcacatgcaggccctgccccctcgctaa

SEQ ID NO: 9045 - DNA, 1098 bp, synthetic construct
  source 1..1098: mol_type = other DNA
atggccttaccagtgaccgccttgctcctgccgctggccttgctgctccacgccgccaggccgttcgaagtgcaactggttgaatccggtggcggcctggtgcaagcaggcggatctctcagacttagctgtgccgcctccggcagaaccttctctatgggatggtttaggcaggctccagggaaagagagagagttcgtcgccgccatcaatctgtctcccacactggcctactacgccgagtctgtgaaaggccggttcaccatctccagagataatgccaagaacaccgtggtgctgcaaatgaactctctgaaacccgaggatacagccctgtactattgtgccgctgagcggaagtccgtgatggccatcagacccgattactggggacagggcacacaagtcacagtgtcctctacgcgtaccacgacgccagcgccgcgaccaccaacaccggcgcccaccatcgcgtcgcagcccctgtccctgcgcccagaggcgtgccggccagcggcggggggcgcagtgcacacgagggggctggacttcgcctgtgacatctacatctgggcgcccttggccgggacttgtggggtccttctcctgtcactggttatcaccctttactgcaaacggggcagaaagaaactcctgtatatattcaaacaaccatttatgagaccagtacaaactactcaagaggaagatggctgtagctgccgatttccagaagaagaagaaggaggatgtgaactgagagtgaagttcagcaggagcgcagacgcccccgcgtaccagcagggccagaaccagctctataacgagctgaatctaggacgaagagaggagtacgatgttttggacaagagacgtggccgggaccctgagatggggggaaagccgagaaggaagaaccctcaggaaggcctgtacaatgaactgcagaaagataagatggcggaggcctacagtgagattgggatgaaaggcgagcgccggaggggcaaggggcacgatggcctttaccagggtctcagtacagccaccaaggacacctacgacgcccttcacatgcaggccctgccccctcgctaa

SEQ ID NO: 9046 - DNA, 1098 bp, synthetic construct
  source 1..1098: mol_type = other DNA
atggccttaccagtgaccgccttgctcctgccgctggccttgctgctccacgccgccaggccgttcgaagtgcaactggttgaatccggtggcggcctggtgcaagcaggcggatctctcagacttagctgtgccgcctccggcagaaccttcacaatgggatggtttaggcaggctccagggaaagagagagagttcgtcgccgccatcaatctgtctcccacactggcctactacgccgattctgtgaaaggccggttcaccatctccagagataatgccaagaacaccgtggtgctgcaaatgaactctctgaaacccgaggatacagccctgtactattgtgccgctgagcggaagtccgtgatggccatcagacccgattactggggacagggcacacaagtcacagtgtcctctacgcgtaccacgacgccagcgccgcgaccaccaacaccggcgcccaccatcgcgtcgcagcccctgtccctgcgcccagaggcgtgccggccagcggcggggggcgcagtgcacacgagggggctggacttcgcctgtgacatctacatctgggcgcccttggccgggacttgtggggtccttctcctgtcactggttatcaccctttactgcaaacggggcagaaagaaactcctgtatatattcaaacaaccatttatgagaccagtacaaactactcaagaggaagatggctgtagctgccgatttccagaagaagaagaaggaggatgtgaactgagagtgaagttcagcaggagcgcagacgcccccgcgtaccagcagggccagaaccagctctataacgagctgaatctaggacgaagagaggagtacgatgttttggacaagagacgtggccgggaccctgagatggggggaaagccgagaaggaagaaccctcaggaaggcctgtacaatgaactgcagaaagataagatggcggaggcctacagtgagattgggatgaaaggcgagcgccggaggggcaaggggcacgatggcctttaccagggtctcagtacagccaccaaggacacctacgacgcccttcacatgcaggccctgccccctcgctaa

SEQ ID NO: 9047 - DNA, 1098 bp, synthetic construct
  source 1..1098: mol_type = other DNA
atggccttaccagtgaccgccttgctcctgccgctggccttgctgctccacgccgccaggccgttcgaagtgcaactggttgaatccggtggcggcctggtgcaagcaggcggatctctcagacttagctgtgccgcctccggcagaaccttcacaatgggatggtttaggcaggctccagggaaagagagagagttcgtcgccgccatcaatctgtctcccacactggcctactacgccgagtctgtgagaggccggttcaccatctccagagataatgccaagaacaccgtggtgctgcaaatgaactctctgaaacccgaggatacagccctgtactattgtgccgctgagcggaagtccgtgatggccatcagacccgattactggggacagggcacacaagtcacagtgtcctctacgcgtaccacgacgccagcgccgcgaccaccaacaccggcgcccaccatcgcgtcgcagcccctgtccctgcgcccagaggcgtgccggccagcggcggggggcgcagtgcacacgagggggctggacttcgcctgtgacatctacatctgggcgcccttggccgggacttgtggggtccttctcctgtcactggttatcaccctttactgcaaacggggcagaaagaaactcctgtatatattcaaacaaccatttatgagaccagtacaaactactcaagaggaagatggctgtagctgccgatttccagaagaagaagaaggaggatgtgaactgagagtgaagttcagcaggagcgcagacgcccccgcgtaccagcagggccagaaccagctctataacgagctgaatctaggacgaagagaggagtacgatgttttggacaagagacgtggccgggaccctgagatggggggaaagccgagaaggaagaaccctcaggaaggcctgtacaatgaactgcagaaagataagatggcggaggcctacagtgagattgggatgaaaggcgagcgccggaggggcaaggggcacgatggcctttaccagggtctcagtacagccaccaaggacacctacgacgcccttcacatgcaggccctgccccctcgctaa

SEQ ID NO: 9048 - DNA, 1824 bp, synthetic construct
  source 1..1824: mol_type = other DNA
atggccttaccagtgaccgccttgctcctgccgctggccttgctgctccacgccgccaggccgttcgaagtgcaactggttgaatccggtggcggcctggtgcaagcaggcggatctctcagacttagctgtgccgcctccggcagaaccttcacaatgggatggtttaggcaggctccagggaaagagagagagttcgtcgccgccatcaatctgtctcccacactggcctactacgccgagtctgtgaaaggccggttcaccatctccagagataatgccaagaacaccgtggtgctgcaaatgaactctctgaaacccgaggatacagccctgtactattgtgccgctgaccggaagtccgtgatgagcatcagacccgattactggggacagggcacacaagtcacagtgtcctctacgcgtggaggcagtggtgtcttcacactcgaagatttcgttggggactggcgacagacagccggctacaacctggaccaagtccttgaacagggaggtgtgtccagtttgtttcagaatctcggggtgtccgtaactccgatccaaaggattgtcctgagcggtgaaaatgggctgaagatcgacatccatgtcatcatcccgtatgaaggtctgagcggcgaccaaatgggccagatcgaaaaaatttttaaggtggtgtaccctgtggatgatcatcactttaaggtgatcctgcactatggcacactggtaatcgacggggttacgccgaacatgatcgactatttcggacggccctatgaaggcatcgccgtgttcgacggcaaaaagatcactgtaacagggaccctgtggaacggcaacaaaattatcgacgagcgcctgatcaaccccgacggctccctgctgttccgagtaaccatcaacggagtgaccggctggcggctgtgcgaacgcattctggcgctcgagggaggcagctggagccaccctcagtttgaaaaagactacaaagacgatgacgataagggatcagattacaaggatgatgatgacaaggggtcagattataaagacgacgatgataaagggagcgactacaaggacgacgatgacaaggcctggtcccatccccagttcgagaaacaccatcaccaccaccatcatcacactagtggctccggcgagggcagaggaagtctactaacctgcggagatgtggaagaaaatcctggcccacatatgaccgagtacaagcccacggtgcgcctcgccacccgcgacgacgtccccagggccgtacgcaccctcgccgccgcgttcgccgactaccccgccacgcgccacaccgtcgatccggaccgccacatcgagcgggtcaccgagctgcaagaactcttcctcacgcgcgtcgggctcgacatcggcaaggtgtgggtcgcggacgacggcgccgcggtggcggtctggaccacgccggagagcgtcgaagcgggggcggtgttcgccgagatcggcccgcgcatggccgagttgagcggttcccggctggccgcgcagcaacagatggaaggcctcctggcgccgcaccggcccaaggagcccgcgtggttcctggccaccgtcggcgtctcgcccgaccaccagggcaagggtctgggcagcgccgtcgtgctccccggagtggaggcggccgagcgcgccggggtgcccgccttcctggagacctccgcgccccgcaacctccccttctacgagcggctcggcttcaccgtcaccgccgacgtcgaggtgcccgaaggaccgcgcacctggtgcatgacccgcaagcccggtgcctga

SEQ ID NO: 9049 - DNA, 1824 bp, synthetic construct
  source 1..1824: mol_type = other DNA
atggccttaccagtgaccgccttgctcctgccgctggccttgctgctccacgccgccaggccgttcgaagtgcaactggttgaatccggtggcggcctggtgcaagcaggcggatctctcagacttagctgtgccgcctccggcagaaccttcacaatgggatggtttaggcaggctccagggaaagagagagagttcgtcgccgccatctctctgtctcccacactggcctactacgccgagtctgtgaaaggccggttcaccatctccagagataatgccaagaacaccgtggtgctgcaaatgaactctctgaaacccgaggatacagccctgtactattgtgccgctgaccggaagtccgtgatggccatcagacccgattactggggacagggcacacaagtcacagtgtcctctacgcgtggaggcagtggtgtcttcacactcgaagatttcgttggggactggcgacagacagccggctacaacctggaccaagtccttgaacagggaggtgtgtccagtttgtttcagaatctcggggtgtccgtaactccgatccaaaggattgtcctgagcggtgaaaatgggctgaagatcgacatccatgtcatcatcccgtatgaaggtctgagcggcgaccaaatgggccagatcgaaaaaatttttaaggtggtgtaccctgtggatgatcatcactttaaggtgatcctgcactatggcacactggtaatcgacggggttacgccgaacatgatcgactatttcggacggccctatgaaggcatcgccgtgttcgacggcaaaaagatcactgtaacagggaccctgtggaacggcaacaaaattatcgacgagcgcctgatcaaccccgacggctccctgctgttccgagtaaccatcaacggagtgaccggctggcggctgtgcgaacgcattctggcgctcgagggaggcagctggagccaccctcagtttgaaaaagactacaaagacgatgacgataagggatcagattacaaggatgatgatgacaaggggtcagattataaagacgacgatgataaagggagcgactacaaggacgacgatgacaaggcctggtcccatccccagttcgagaaacaccatcaccaccaccatcatcacactagtggctccggcgagggcagaggaagtctactaacctgcggagatgtggaagaaaatcctggcccacatatgaccgagtacaagcccacggtgcgcctcgccacccgcgacgacgtccccagggccgtacgcaccctcgccgccgcgttcgccgactaccccgccacgcgccacaccgtcgatccggaccgccacatcgagcgggtcaccgagctgcaagaactcttcctcacgcgcgtcgggctcgacatcggcaaggtgtgggtcgcggacgacggcgccgcggtggcggtctggaccacgccggagagcgtcgaagcgggggcggtgttcgccgagatcggcccgcgcatggccgagttgagcggttcccggctggccgcgcagcaacagatggaaggcctcctggcgccgcaccggcccaaggagcccgcgtggttcctggccaccgtcggcgtctcgcccgaccaccagggcaagggtctgggcagcgccgtcgtgctccccggagtggaggcggccgagcgcgccggggtgcccgccttcctggagacctccgcgccccgcaacctccccttctacgagcggctcggcttcaccgtcaccgccgacgtcgaggtgcccgaaggaccgcgcacctggtgcatgacccgcaagcccggtgcctga

SEQ ID NO: 9050 - DNA, 1800 bp, synthetic construct
  source 1..1800: mol_type = other DNA
atggccttaccagtgaccgccttgctcctgccgctggccttgctgctccacgccgccaggccgttcgaagtgcaactggttgaatccggtggcggcctggtgcaagcaggcggatctctcagacttagctgtgccgcctccggcagaaccttcacaatgggatggtttaggcaggctccagggaaagagagagagttcgtcgccgccatctctctgtctcccacactggcctactacgccgagtctgtgaaaggccggttcaccatctccagagataatgccaagaacaccgtggtgctgcaaatgaactctctgaaacccgaggatacagccctgtactattgtgccgctgagcggaagtccgtgatgagcatcacacaagtcacagtgtcctctacgcgtggaggcagtggtgtcttcacactcgaagatttcgttggggactggcgacagacagccggctacaacctggaccaagtccttgaacagggaggtgtgtccagtttgtttcagaatctcggggtgtccgtaactccgatccaaaggattgtcctgagcggtgaaaatgggctgaagatcgacatccatgtcatcatcccgtatgaaggtctgagcggcgaccaaatgggccagatcgaaaaaatttttaaggtggtgtaccctgtggatgatcatcactttaaggtgatcctgcactatggcacactggtaatcgacggggttacgccgaacatgatcgactatttcggacggccctatgaaggcatcgccgtgttcgacggcaaaaagatcactgtaacagggaccctgtggaacggcaacaaaattatcgacgagcgcctgatcaaccccgacggctccctgctgttccgagtaaccatcaacggagtgaccggctggcggctgtgcgaacgcattctggcgctcgagggaggcagctggagccaccctcagtttgaaaaagactacaaagacgatgacgataagggatcagattacaaggatgatgatgacaaggggtcagattataaagacgacgatgataaagggagcgactacaaggacgacgatgacaaggcctggtcccatccccagttcgagaaacaccatcaccaccaccatcatcacactagtggctccggcgagggcagaggaagtctactaacctgcggagatgtggaagaaaatcctggcccacatatgaccgagtacaagcccacggtgcgcctcgccacccgcgacgacgtccccagggccgtacgcaccctcgccgccgcgttcgccgactaccccgccacgcgccacaccgtcgatccggaccgccacatcgagcgggtcaccgagctgcaagaactcttcctcacgcgcgtcgggctcgacatcggcaaggtgtgggtcgcggacgacggcgccgcggtggcggtctggaccacgccggagagcgtcgaagcgggggcggtgttcgccgagatcggcccgcgcatggccgagttgagcggttcccggctggccgcgcagcaacagatggaaggcctcctggcgccgcaccggcccaaggagcccgcgtggttcctggccaccgtcggcgtctcgcccgaccaccagggcaagggtctgggcagcgccgtcgtgctccccggagtggaggcggccgagcgcgccggggtgcccgccttcctggagacctccgcgccccgcaacctccccttctacgagcggctcggcttcaccgtcaccgccgacgtcgaggtgcccgaaggaccgcgcacctggtgcatgacccgcaagcccggtgcctga

SEQ ID NO: 9051 - DNA, 1824 bp, synthetic construct
  source 1..1824: mol_type = other DNA
atggccttaccagtgaccgccttgctcctgccgctggccttgctgctccacgccgccaggccgttcgaagtgcaactggttgaatccggtggcggcctggtgcaagcaggcggatctctcagacttagctgtgccgcctccggcagaaccttcacaatgggatggtttaggcaggctccagggaaagagagagagttcgtcgccgccatcaatctgtctcccacactggcctactacgccgattctgtgaaaggccggttcaccatctccagagataatgccaagaacaccgtggtgctgcaaatgaactctctgaaacccgaggatacagccctgtactattgtgccgctgagcggaagtccgtgatggccatcagacccgattactggggacagggcacacaagtcacagtgtcctctacgcgtggaggcagtggtgtcttcacactcgaagatttcgttggggactggcgacagacagccggctacaacctggaccaagtccttgaacagggaggtgtgtccagtttgtttcagaatctcggggtgtccgtaactccgatccaaaggattgtcctgagcggtgaaaatgggctgaagatcgacatccatgtcatcatcccgtatgaaggtctgagcggcgaccaaatgggccagatcgaaaaaatttttaaggtggtgtaccctgtggatgatcatcactttaaggtgatcctgcactatggcacactggtaatcgacggggttacgccgaacatgatcgactatttcggacggccctatgaaggcatcgccgtgttcgacggcaaaaagatcactgtaacagggaccctgtggaacggcaacaaaattatcgacgagcgcctgatcaaccccgacggctccctgctgttccgagtaaccatcaacggagtgaccggctggcggctgtgcgaacgcattctggcgctcgagggaggcagctggagccaccctcagtttgaaaaagactacaaagacgatgacgataagggatcagattacaaggatgatgatgacaaggggtcagattataaagacgacgatgataaagggagcgactacaaggacgacgatgacaaggcctggtcccatccccagttcgagaaacaccatcaccaccaccatcatcacactagtggctccggcgagggcagaggaagtctactaacctgcggagatgtggaagaaaatcctggcccacatatgaccgagtacaagcccacggtgcgcctcgccacccgcgacgacgtccccagggccgtacgcaccctcgccgccgcgttcgccgactaccccgccacgcgccacaccgtcgatccggaccgccacatcgagcgggtcaccgagctgcaagaactcttcctcacgcgcgtcgggctcgacatcggcaaggtgtgggtcgcggacgacggcgccgcggtggcggtctggaccacgccggagagcgtcgaagcgggggcggtgttcgccgagatcggcccgcgcatggccgagttgagcggttcccggctggccgcgcagcaacagatggaaggcctcctggcgccgcaccggcccaaggagcccgcgtggttcctggccaccgtcggcgtctcgcccgaccaccagggcaagggtctgggcagcgccgtcgtgctccccggagtggaggcggccgagcgcgccggggtgcccgccttcctggagacctccgcgccccgcaacctccccttctacgagcggctcggcttcaccgtcaccgccgacgtcgaggtgcccgaaggaccgcgcacctggtgcatgacccgcaagcccggtgcctga

SEQ ID NO: 9052 - DNA, 1824 bp, synthetic construct
  source 1..1824: mol_type = other DNA
atggccttaccagtgaccgccttgctcctgccgctggccttgctgctccacgccgccaggccgttcgaagtgcaactggttgaatccggtggcggcctggtgcaagcaggcggatctctcagacttagctgtgccgcctccggcagaaccttctctatgggatggtttaggcaggctccagggaaagagagagagttcgtcgccgccatcaatctgtctcccacactggcctactacgccgagtctgtgaaaggccggttcaccatctccagagataatgccaagaacaccgtggtgctgcaaatgaactctctgaaacccgaggatacagccctgtactattgtgccgctgagcggaagtccgtgatggccatcagacccgattactggggacagggcacacaagtcacagtgtcctctacgcgtggaggcagtggtgtcttcacactcgaagatttcgttggggactggcgacagacagccggctacaacctggaccaagtccttgaacagggaggtgtgtccagtttgtttcagaatctcggggtgtccgtaactccgatccaaaggattgtcctgagcggtgaaaatgggctgaagatcgacatccatgtcatcatcccgtatgaaggtctgagcggcgaccaaatgggccagatcgaaaaaatttttaaggtggtgtaccctgtggatgatcatcactttaaggtgatcctgcactatggcacactggtaatcgacggggttacgccgaacatgatcgactatttcggacggccctatgaaggcatcgccgtgttcgacggcaaaaagatcactgtaacagggaccctgtggaacggcaacaaaattatcgacgagcgcctgatcaaccccgacggctccctgctgttccgagtaaccatcaacggagtgaccggctggcggctgtgcgaacgcattctggcgctcgagggaggcagctggagccaccctcagtttgaaaaagactacaaagacgatgacgataagggatcagattacaaggatgatgatgacaaggggtcagattataaagacgacgatgataaagggagcgactacaaggacgacgatgacaaggcctggtcccatccccagttcgagaaacaccatcaccaccaccatcatcacactagtggctccggcgagggcagaggaagtctactaacctgcggagatgtggaagaaaatcctggcccacatatgaccgagtacaagcccacggtgcgcctcgccacccgcgacgacgtccccagggccgtacgcaccctcgccgccgcgttcgccgactaccccgccacgcgccacaccgtcgatccggaccgccacatcgagcgggtcaccgagctgcaagaactcttcctcacgcgcgtcgggctcgacatcggcaaggtgtgggtcgcggacgacggcgccgcggtggcggtctggaccacgccggagagcgtcgaagcgggggcggtgttcgccgagatcggcccgcgcatggccgagttgagcggttcccggctggccgcgcagcaacagatggaaggcctcctggcgccgcaccggcccaaggagcccgcgtggttcctggccaccgtcggcgtctcgcccgaccaccagggcaagggtctgggcagcgccgtcgtgctccccggagtggaggcggccgagcgcgccggggtgcccgccttcctggagacctccgcgccccgcaacctccccttctacgagcggctcggcttcaccgtcaccgccgacgtcgaggtgcccgaaggaccgcgcacctggtgcatgacccgcaagcccggtgcctga

SEQ ID NO: 9053 - DNA, 1824 bp, synthetic construct
  source 1..1824: mol_type = other DNA
atggccctgcctgtgacagctctgctgctgcctctggcactgctgctgcacgccgccagacctcaagtgaagctggaagagtctggcggaggactggtgcaggctggaagaagcctgagactgtcttgtgccgccagcgagcacacctttagctctcacgtgatgggctggttcagacaggcccctggcaaagaaagggaaagcgtggccgttatcggctggcgggatattagcaccagctacgccgatagcgtgaagggcagattcaccatcagccgggacaacgccaagaaaaccctgtacctccagatgaacagcctgaagccagaggacaccgccgtgtactactgcgccgccagaagaattgacgccgccgactacgattcttggggccagggaacccaagtgaccgtttctagcacgcgtggaggcagtggtgtcttcacactcgaagatttcgttggggactggcgacagacagccggctacaacctggaccaagtccttgaacagggaggtgtgtccagtttgtttcagaatctcggggtgtccgtaactccgatccaaaggattgtcctgagcggtgaaaatgggctgaagatcgacatccatgtcatcatcccgtatgaaggtctgagcggcgaccaaatgggccagatcgaaaaaatttttaaggtggtgtaccctgtggatgatcatcactttaaggtgatcctgcactatggcacactggtaatcgacggggttacgccgaacatgatcgactatttcggacggccctatgaaggcatcgccgtgttcgacggcaaaaagatcactgtaacagggaccctgtggaacggcaacaaaattatcgacgagcgcctgatcaaccccgacggctccctgctgttccgagtaaccatcaacggagtgaccggctggcggctgtgcgaacgcattctggcgctcgagggaggcagctggagccaccctcagtttgaaaaagactacaaagacgatgacgataagggatcagattacaaggatgatgatgacaaggggtcagattataaagacgacgatgataaagggagcgactacaaggacgacgatgacaaggcctggtcccatccccagttcgagaaacaccatcaccaccaccatcatcacactagtggctccggcgagggcagaggaagtctactaacctgcggagatgtggaagaaaatcctggcccacatatgaccgagtacaagcccacggtgcgcctcgccacccgcgacgacgtccccagggccgtacgcaccctcgccgccgcgttcgccgactaccccgccacgcgccacaccgtcgatccggaccgccacatcgagcgggtcaccgagctgcaagaactcttcctcacgcgcgtcgggctcgacatcggcaaggtgtgggtcgcggacgacggcgccgcggtggcggtctggaccacgccggagagcgtcgaagcgggggcggtgttcgccgagatcggcccgcgcatggccgagttgagcggttcccggctggccgcgcagcaacagatggaaggcctcctggcgccgcaccggcccaaggagcccgcgtggttcctggccaccgtcggcgtctcgcccgaccaccagggcaagggtctgggcagcgccgtcgtgctccccggagtggaggcggccgagcgcgccggggtgcccgccttcctggagacctccgcgccccgcaacctccccttctacgagcggctcggcttcaccgtcaccgccgacgtcgaggtgcccgaaggaccgcgcacctggtgcatgacccgcaagcccggtgcctga

SEQ ID NO: 9054 - DNA, 1824 bp, synthetic construct
  source 1..1824: mol_type = other DNA
atggccttaccagtgaccgccttgctcctgccgctggccttgctgctccacgccgccaggccgttcgaagtgcaactggttgaatccggtggcggcctggtgcaagcaggcggatctctcagacttagctgtgccgcctccggcagaaccttcacaatgggatggtttaggcaggctccagggaaagagagagagttcgtcgccgccatcaatctgtctcccacactggcctactacgccgagtctgtgaaaggccggttcaccatctccagagataatgccaagaacaccgtggtgctgcaaatgaactctctgaaacccgaggatacagccctgtactattgtgccgctgaccggaagtccgtgatggccatcagacccgattactggggacagggcacacaagtcacagtgtcctctacgcgtggaggcagtggtgtcttcacactcgaagatttcgttggggactggcgacagacagccggctacaacctggaccaagtccttgaacagggaggtgtgtccagtttgtttcagaatctcggggtgtccgtaactccgatccaaaggattgtcctgagcggtgaaaatgggctgaagatcgacatccatgtcatcatcccgtatgaaggtctgagcggcgaccaaatgggccagatcgaaaaaatttttaaggtggtgtaccctgtggatgatcatcactttaaggtgatcctgcactatggcacactggtaatcgacggggttacgccgaacatgatcgactatttcggacggccctatgaaggcatcgccgtgttcgacggcaaaaagatcactgtaacagggaccctgtggaacggcaacaaaattatcgacgagcgcctgatcaaccccgacggctccctgctgttccgagtaaccatcaacggagtgaccggctggcggctgtgcgaacgcattctggcgctcgagggaggcagctggagccaccctcagtttgaaaaagactacaaagacgatgacgataagggatcagattacaaggatgatgatgacaaggggtcagattataaagacgacgatgataaagggagcgactacaaggacgacgatgacaaggcctggtcccatccccagttcgagaaacaccatcaccaccaccatcatcacactagtggctccggcgagggcagaggaagtctactaacctgcggagatgtggaagaaaatcctggcccacatatgaccgagtacaagcccacggtgcgcctcgccacccgcgacgacgtccccagggccgtacgcaccctcgccgccgcgttcgccgactaccccgccacgcgccacaccgtcgatccggaccgccacatcgagcgggtcaccgagctgcaagaactcttcctcacgcgcgtcgggctcgacatcggcaaggtgtgggtcgcggacgacggcgccgcggtggcggtctggaccacgccggagagcgtcgaagcgggggcggtgttcgccgagatcggcccgcgcatggccgagttgagcggttcccggctggccgcgcagcaacagatggaaggcctcctggcgccgcaccggcccaaggagcccgcgtggttcctggccaccgtcggcgtctcgcccgaccaccagggcaagggtctgggcagcgccgtcgtgctccccggagtggaggcggccgagcgcgccggggtgcccgccttcctggagacctccgcgccccgcaacctccccttctacgagcggctcggcttcaccgtcaccgccgacgtcgaggtgcccgaaggaccgcgcacctggtgcatgacccgcaagcccggtgcctga

SEQ ID NO: 9055 - DNA, 1824 bp, synthetic construct
  source 1..1824: mol_type = other DNA
atggccttaccagtgaccgccttgctcctgccgctggccttgctgctccacgccgccaggccgttcgaagtgcaactggttgaatccggtggcggcctggtgcaagcaggcggatctctcagacttagctgtgccgcctccggcagaaccttcacaatgggatggtttaggcaggctccagggaaagagagagagttcgtcgccgccatcaatctgtctcccacactggcctactacgccgagtctgtgagaggccggttcaccatctccagagataatgccaagaacaccgtggtgctgcaaatgaactctctgaaacccgaggatacagccctgtactattgtgccgctgagcggaagtccgtgatggccatcagacccgattactggggacagggcacacaagtcacagtgtcctctacgcgtggaggcagtggtgtcttcacactcgaagatttcgttggggactggcgacagacagccggctacaacctggaccaagtccttgaacagggaggtgtgtccagtttgtttcagaatctcggggtgtccgtaactccgatccaaaggattgtcctgagcggtgaaaatgggctgaagatcgacatccatgtcatcatcccgtatgaaggtctgagcggcgaccaaatgggccagatcgaaaaaatttttaaggtggtgtaccctgtggatgatcatcactttaaggtgatcctgcactatggcacactggtaatcgacggggttacgccgaacatgatcgactatttcggacggccctatgaaggcatcgccgtgttcgacggcaaaaagatcactgtaacagggaccctgtggaacggcaacaaaattatcgacgagcgcctgatcaaccccgacggctccctgctgttccgagtaaccatcaacggagtgaccggctggcggctgtgcgaacgcattctggcgctcgagggaggcagctggagccaccctcagtttgaaaaagactacaaagacgatgacgataagggatcagattacaaggatgatgatgacaaggggtcagattataaagacgacgatgataaagggagcgactacaaggacgacgatgacaaggcctggtcccatccccagttcgagaaacaccatcaccaccaccatcatcacactagtggctccggcgagggcagaggaagtctactaacctgcggagatgtggaagaaaatcctggcccacatatgaccgagtacaagcccacggtgcgcctcgccacccgcgacgacgtccccagggccgtacgcaccctcgccgccgcgttcgccgactaccccgccacgcgccacaccgtcgatccggaccgccacatcgagcgggtcaccgagctgcaagaactcttcctcacgcgcgtcgggctcgacatcggcaaggtgtgggtcgcggacgacggcgccgcggtggcggtctggaccacgccggagagcgtcgaagcgggggcggtgttcgccgagatcggcccgcgcatggccgagttgagcggttcccggctggccgcgcagcaacagatggaaggcctcctggcgccgcaccggcccaaggagcccgcgtggttcctggccaccgtcggcgtctcgcccgaccaccagggcaagggtctgggcagcgccgtcgtgctccccggagtggaggcggccgagcgcgccggggtgcccgccttcctggagacctccgcgccccgcaacctccccttctacgagcggctcggcttcaccgtcaccgccgacgtcgaggtgcccgaaggaccgcgcacctggtgcatgacccgcaagcccggtgcctga

SEQ ID NO: 9056 - DNA, 1824 bp, synthetic construct
  source 1..1824: mol_type = other DNA
atggccttaccagtgaccgccttgctcctgccgctggccttgctgctccacgccgccaggccgttcgaagtgcaactggttgaatccggtggcggcctggtgcaagcaggcggatctctcagacttagctgtgccgcctccggcagaaccttcacaatgggatggtttaggcaggctccagggaaagagagagagttcgtcgccgccatctctctgtctcccacactggcctactacgccgagtctgtgaaaggccggttcaccatctccagagataatgccaagaacaccgtggtgctgcaaatgaactctctgaaacccgaggatacagccctgtactattgtgccgctgagcggaagtccgtgatgagcatcagacccgattactggggacagggcacacaagtcacagtgtcctctacgcgtggaggcagtggtgtcttcacactcgaagatttcgttggggactggcgacagacagccggctacaacctggaccaagtccttgaacagggaggtgtgtccagtttgtttcagaatctcggggtgtccgtaactccgatccaaaggattgtcctgagcggtgaaaatgggctgaagatcgacatccatgtcatcatcccgtatgaaggtctgagcggcgaccaaatgggccagatcgaaaaaatttttaaggtggtgtaccctgtggatgatcatcactttaaggtgatcctgcactatggcacactggtaatcgacggggttacgccgaacatgatcgactatttcggacggccctatgaaggcatcgccgtgttcgacggcaaaaagatcactgtaacagggaccctgtggaacggcaacaaaattatcgacgagcgcctgatcaaccccgacggctccctgctgttccgagtaaccatcaacggagtgaccggctggcggctgtgcgaacgcattctggcgctcgagggaggcagctggagccaccctcagtttgaaaaagactacaaagacgatgacgataagggatcagattacaaggatgatgatgacaaggggtcagattataaagacgacgatgataaagggagcgactacaaggacgacgatgacaaggcctggtcccatccccagttcgagaaacaccatcaccaccaccatcatcacactagtggctccggcgagggcagaggaagtctactaacctgcggagatgtggaagaaaatcctggcccacatatgaccgagtacaagcccacggtgcgcctcgccacccgcgacgacgtccccagggccgtacgcaccctcgccgccgcgttcgccgactaccccgccacgcgccacaccgtcgatccggaccgccacatcgagcgggtcaccgagctgcaagaactcttcctcacgcgcgtcgggctcgacatcggcaaggtgtgggtcgcggacgacggcgccgcggtggcggtctggaccacgccggagagcgtcgaagcgggggcggtgttcgccgagatcggcccgcgcatggccgagttgagcggttcccggctggccgcgcagcaacagatggaaggcctcctggcgccgcaccggcccaaggagcccgcgtggttcctggccaccgtcggcgtctcgcccgaccaccagggcaagggtctgggcagcgccgtcgtgctccccggagtggaggcggccgagcgcgccggggtgcccgccttcctggagacctccgcgccccgcaacctccccttctacgagcggctcggcttcaccgtcaccgccgacgtcgaggtgcccgaaggaccgcgcacctggtgcatgacccgcaagcccggtgcctga

SEQ ID NO: 9057 - DNA, 1824 bp, synthetic construct
  source 1..1824: mol_type = other DNA
atggccttaccagtgaccgccttgctcctgccgctggccttgctgctccacgccgccaggccgttcgaagtgcagctggttgaatctggcggaggactggttcaggctggcggatctctgagactgtcttgtgccgccagcggcagaacctttagcatgggctggtttagacaggcccctggcaaagagagagagttcgtcgccgccatcacatactctggcggcagcccttactacgccgactctgtgaagggcagattcaccatcagccgggacaacgccaagaacaccgtgtacctccagatgaacagcctgaagcctgaggacaccgccgtgtactactgcgccgccaatccaacatacggcagcgactggaacgccgagaattggggccagggaacccaagtgacagtgtctagcacgcgtggaggcagtggtgtcttcacactcgaagatttcgttggggactggcgacagacagccggctacaacctggaccaagtccttgaacagggaggtgtgtccagtttgtttcagaatctcggggtgtccgtaactccgatccaaaggattgtcctgagcggtgaaaatgggctgaagatcgacatccatgtcatcatcccgtatgaaggtctgagcggcgaccaaatgggccagatcgaaaaaatttttaaggtggtgtaccctgtggatgatcatcactttaaggtgatcctgcactatggcacactggtaatcgacggggttacgccgaacatgatcgactatttcggacggccctatgaaggcatcgccgtgttcgacggcaaaaagatcactgtaacagggaccctgtggaacggcaacaaaattatcgacgagcgcctgatcaaccccgacggctccctgctgttccgagtaaccatcaacggagtgaccggctggcggctgtgcgaacgcattctggcgctcgagggaggcagctggagccaccctcagtttgaaaaagactacaaagacgatgacgataagggatcagattacaaggatgatgatgacaaggggtcagattataaagacgacgatgataaagggagcgactacaaggacgacgatgacaaggcctggtcccatccccagttcgagaaacaccatcaccaccaccatcatcacactagtggctccggcgagggcagaggaagtctactaacctgcggagatgtggaagaaaatcctggcccacatatgaccgagtacaagcccacggtgcgcctcgccacccgcgacgacgtccccagggccgtacgcaccctcgccgccgcgttcgccgactaccccgccacgcgccacaccgtcgatccggaccgccacatcgagcgggtcaccgagctgcaagaactcttcctcacgcgcgtcgggctcgacatcggcaaggtgtgggtcgcggacgacggcgccgcggtggcggtctggaccacgccggagagcgtcgaagcgggggcggtgttcgccgagatcggcccgcgcatggccgagttgagcggttcccggctggccgcgcagcaacagatggaaggcctcctggcgccgcaccggcccaaggagcccgcgtggttcctggccaccgtcggcgtctcgcccgaccaccagggcaagggtctgggcagcgccgtcgtgctccccggagtggaggcggccgagcgcgccggggtgcccgccttcctggagacctccgcgccccgcaacctccccttctacgagcggctcggcttcaccgtcaccgccgacgtcgaggtgcccgaaggaccgcgcacctggtgcatgacccgcaagcccggtgcctga

SEQ ID NO: 9058 - DNA, 1824 bp, synthetic construct; identical to SEQ ID NO: 9057
  source 1..1824: mol_type = other DNA

SEQ ID NO: 9059 - DNA, 1821 bp, synthetic construct
  source 1..1821: mol_type = other DNA
atggactggatttggcgcatccttttccttgtcggcgctgctaccggcgcccattccgggcccgaagtgcagctgctggaatctggcggaggactggttcaggctggcggatctctgagactgtcttgtgccgccagcggcagaacctttagcatgggctggtttagacaggcccctggcaaagagagagagttcgtcgccgccatcacatactctggcggcagcccttactacgccgactctgtgaagggcagattcaccatcagccgggacaacgccaagaacaccgtgtacctccagatgaacagcctgaagcctgaggacaccgccgtgtactactgcgccgccaatccaacatacggcagcgactggaacgccgagaattggggccagggaacccaagtgacagtgtctagcacgcgtggaggcagtggtgtcttcacactcgaagatttcgttggggactggcgacagacagccggctacaacctggaccaagtccttgaacagggaggtgtgtccagtttgtttcagaatctcggggtgtccgtaactccgatccaaaggattgtcctgagcggtgaaaatgggctgaagatcgacatccatgtcatcatcccgtatgaaggtctgagcggcgaccaaatgggccagatcgaaaaaatttttaaggtggtgtaccctgtggatgatcatcactttaaggtgatcctgcactatggcacactggtaatcgacggggttacgccgaacatgatcgactatttcggacggccctatgaaggcatcgccgtgttcgacggcaaaaagatcactgtaacagggaccctgtggaacggcaacaaaattatcgacgagcgcctgatcaaccccgacggctccctgctgttccgagtaaccatcaacggagtgaccggctggcggctgtgcgaacgcattctggcgctcgagggaggcagctggagccaccctcagtttgaaaaagactacaaagacgatgacgataagggatcagattacaaggatgatgatgacaaggggtcagattataaagacgacgatgataaagggagcgactacaaggacgacgatgacaaggcctggtcccatccccagttcgagaaacaccatcaccaccaccatcatcacactagtggctccggcgagggcagaggaagtctactaacctgcggagatgtggaagaaaatcctggcccacatatgaccgagtacaagcccacggtgcgcctcgccacccgcgacgacgtccccagggccgtacgcaccctcgccgccgcgttcgccgactaccccgccacgcgccacaccgtcgatccggaccgccacatcgagcgggtcaccgagctgcaagaactcttcctcacgcgcgtcgggctcgacatcggcaaggtgtgggtcgcggacgacggcgccgcggtggcggtctggaccacgccggagagcgtcgaagcgggggcggtgttcgccgagatcggcccgcgcatggccgagttgagcggttcccggctggccgcgcagcaacagatggaaggcctcctggcgccgcaccggcccaaggagcccgcgtggttcctggccaccgtcggcgtctcgcccgaccaccagggcaagggtctgggcagcgccgtcgtgctccccggagtggaggcggccgagcgcgccggggtgcccgccttcctggagacctccgcgccccgcaacctccccttctacgagcggctcggcttcaccgtcaccgccgacgtcgaggtgcccgaaggaccgcgcacctggtgcatgacccgcaagcccggtgcctga

SEQ ID NO: 9060 - DNA, 1821 bp, synthetic construct
  source 1..1821: mol_type = other DNA
atggactggatttggcgcatccttttccttgtcggcgctgctaccggcgcccattccgggcccgaagtgcagctgctggaatctggcggaggactggttcaggctggcggatctctgagactgtcttgtgccgccagcggcagaacctttagcatgggctggtttagacaggcccctggcaaagagagagagttcgtcgccgccatcacatactctggcggcagcccttactacgccgactctgtgaagggcagattcaccatcagccgggacaacgccaagaacaccgtgtacctccagatgaacagcctgaagcctgaggacaccgccgtgtactactgcgccgccaatccaacatacggcagcgactggaacgccgagaattggggccagggaaccctggtgacagtgtctagcacgcgtggaggcagtggtgtcttcacactcgaagatttcgttggggactggcgacagacagccggctacaacctggaccaagtccttgaacagggaggtgtgtccagtttgtttcagaatctcggggtgtccgtaactccgatccaaaggattgtcctgagcggtgaaaatgggctgaagatcgacatccatgtcatcatcccgtatgaaggtctgagcggcgaccaaatgggccagatcgaaaaaatttttaaggtggtgtaccctgtggatgatcatcactttaaggtgatcctgcactatggcacactggtaatcgacggggttacgccgaacatgatcgactatttcggacggccctatgaaggcatcgccgtgttcgacggcaaaaagatcactgtaacagggaccctgtggaacggcaacaaaattatcgacgagcgcctgatcaaccccgacggctccctgctgttccgagtaaccatcaacggagtgaccggctggcggctgtgcgaacgcattctggcgctcgagggaggcagctggagccaccctcagtttgaaaaagactacaaagacgatgacgataagggatcagattacaaggatgatgatgacaaggggtcagattataaagacgacgatgataaagggagcgactacaaggacgacgatgacaaggcctggtcccatccccagttcgagaaacaccatcaccaccaccatcatcacactagtggctccggcgagggcagaggaagtctactaacctgcggagatgtggaagaaaatcctggcccacatatgaccgagtacaagcccacggtgcgcctcgccacccgcgacgacgtccccagggccgtacgcaccctcgccgccgcgttcgccgactaccccgccacgcgccacaccgtcgatccggaccgccacatcgagcgggtcaccgagctgcaagaactcttcctcacgcgcgtcgggctcgacatcggcaaggtgtgggtcgcggacgacggcgccgcggtggcggtctggaccacgccggagagcgtcgaagcgggggcggtgttcgccgagatcggcccgcgcatggccgagttgagcggttcccggctggccgcgcagcaacagatggaaggcctcctggcgccgcaccggcccaaggagcccgcgtggttcctggccaccgtcggcgtctcgcccgaccaccagggcaagggtctgggcagcgccgtcgtgctccccggagtggaggcggccgagcgcgccggggtgcccgccttcctggagacctccgcgccccgcaacctccccttctacgagcggctcggcttcaccgtcaccgccgacgtcgaggtgcccgaaggaccgcgcacctggtgcatgacccgcaagcccggtgcctga

SEQ ID NO: 9061 - DNA, 1821 bp, synthetic construct
  source 1..1821: mol_type = other DNA
atggccttaccagtgaccgccttgctcctgccgctggccttgctgctccacgccgccaggccggaagtgcagctggttgaatctggcggaggactggttcaggctggcggatctctgagactgtcttgtgccgccagcggcagaacctttacaatgggctggtttagacaggcccctggcaaagagagagagttcgtcgccgccatcacatactctggcggcagcccttactacgccgactctgtgaagggcagattcaccatcagccgggacaacgccaagaacaccgtggtgctccagatgaacagcctgaagcctgaggacaccgccctgtactactgcgccgccaatccaacatacggcagcgactggaacgccgagaattggggccagggaacccaagtgacagtgtctagcacgcgtggaggcagtggtgtcttcacactcgaagatttcgttggggactggcgacagacagccggctacaacctggaccaagtccttgaacagggaggtgtgtccagtttgtttcagaatctcggggtgtccgtaactccgatccaaaggattgtcctgagcggtgaaaatgggctgaagatcgacatccatgtcatcatcccgtatgaaggtctgagcggcgaccaaatgggccagatcgaaaaaatttttaaggtggtgtaccctgtggatgatcatcactttaaggtgatcctgcactatggcacactggtaatcgacggggttacgccgaacatgatcgactatttcggacggccctatgaaggcatcgccgtgttcgacggcaaaaagatcactgtaacagggaccctgtggaacggcaacaaaattatcgacgagcgcctgatcaaccccgacggctccctgctgttccgagtaaccatcaacggagtgaccggctggcggctgtgcgaacgcattctggcgctcgagggaggcagctggagccaccctcagtttgaaaaagactacaaagacgatgacgataagggatcagattacaaggatgatgatgacaaggggtcagattataaagacgacgatgataaagggagcgactacaaggacgacgatgacaaggcctggtcccatccccagttcgagaaacaccatcaccaccaccatcatcacactagtggctccggcgagggcagaggaagtctactaacctgcggagatgtggaagaaaatcctggcccacatatgaccgagtacaagcccacggtgcgcctcgccacccgcgacgacgtccccagggccgtacgcaccctcgccgccgcgttcgccgactaccccgccacgcgccacaccgtcgatccggaccgccacatcgagcgggtcaccgagctgcaagaactcttcctcacgcgcgtcgggctcgacatcggcaaggtgtgggtcgcggacgacggcgccgcggtggcggtctggaccacgccggagagcgtcgaagcgggggcggtgttcgccgagatcggcccgcgcatggccgagttgagcggttcccggctggccgcgcagcaacagatggaaggcctcctggcgccgcaccggcccaaggagcccgcgtggttcctggccaccgtcggcgtctcgcccgaccaccagggcaagggtctgggcagcgccgtcgtgctccccggagtggaggcggccgagcgcgccggggtgcccgccttcctggagacctccgcgccccgcaacctccccttctacgagcggctcggcttcaccgtcaccgccgacgtcgaggtgcccgaaggaccgcgcacctggtgcatgacccgcaagcccggtgcctga

SEQ ID NO: 9062 - DNA, 1821 bp, synthetic construct
  source 1..1821: mol_type = other DNA
atggactggatttggcgcatccttttccttgtcggcgctgctaccggcgcccattccgggccccaggttcagctgcaagagtctggcggaggacttgctcaagctggcggaagcctgagactgtcttgtgccgcctctggcagaaccttcagcatgggctggtttagacaggcccctggcaaagagagagagttcgtcgccgccatcacatacagcggcggcagcccttactacgcctcttctgtcagaggccggttcaccatcagccgggacaacgccaagaacaccgtgtacctccagatgaacagcctgaagccagaggacaccgccgtgtactactgtgccgccaatccaacctacggcagcgactggaatgccgagaattggggccagggcacccaagtgacagtgtctagtacgcgtggaggcagtggtgtcttcacactcgaagatttcgttggggactggcgacagacagccggctacaacctggaccaagtccttgaacagggaggtgtgtccagtttgtttcagaatctcggggtgtccgtaactccgatccaaaggattgtcctgagcggtgaaaatgggctgaagatcgacatccatgtcatcatcccgtatgaaggtctgagcggcgaccaaatgggccagatcgaaaaaatttttaaggtggtgtaccctgtggatgatcatcactttaaggtgatcctgcactatggcacactggtaatcgacggggttacgccgaacatgatcgactatttcggacggccctatgaaggcatcgccgtgttcgacggcaaaaagatcactgtaacagggaccctgtggaacggcaacaaaattatcgacgagcgcctgatcaaccccgacggctccctgctgttccgagtaaccatcaacggagtgaccggctggcggctgtgcgaacgcattctggcgctcgagggaggcagctggagccaccctcagtttgaaaaagactacaaagacgatgacgataagggatcagattacaaggatgatgatgacaaggggtcagattataaagacgacgatgataaagggagcgactacaaggacgacgatgacaaggcctggtcccatccccagttcgagaaacaccatcaccaccaccatcatcacactagtggctccggcgagggcagaggaagtctactaacctgcggagatgtggaagaaaatcctggcccacatatgaccgagtacaagcccacggtgcgcctcgccacccgcgacgacgtccccagggccgtacgcaccctcgccgccgcgttcgccgactaccccgccacgcgccacaccgtcgatccggaccgccacatcgagcgggtcaccgagctgcaagaactcttcctcacgcgcgtcgggctcgacatcggcaaggtgtgggtcgcggacgacggcgccgcggtggcggtctggaccacgccggagagcgtcgaagcgggggcggtgttcgccgagatcggcccgcgcatggccgagttgagcggttcccggctggccgcgcagcaacagatggaaggcctcctggcgccgcaccggcccaaggagcccgcgtggttcctggccaccgtcggcgtctcgcccgaccaccagggcaagggtctgggcagcgccgtcgtgctccccggagtggaggcggccgagcgcgccggggtgcccgccttcctggagacctccgcgccccgcaacctccccttctacgagcggctcggcttcaccgtcaccgccgacgtcgaggtgcccgaaggaccgcgcacctggtgcatgacccgcaagcccggtgcctga

SEQ ID NO: 9063 - DNA, 1104 bp, synthetic construct
  source 1..1104: mol_type = other DNA
atggccctgcctgtgacagctctgctgctgcctctggcactgctgctgcacgccgccagacctcaggttcagctgcaagagtctggcggaggactggttcaagctggcggaagcctgagactgtcttgtgctgccagcggcagatccttcagcagcgtgaacatgggctggttcagacaggcccctggcaaagagagagagttcgtcgccgccattgattggagcggcggcagcccttactacaccgattctgtgaagggcagattcaccatcagccgggacaacagcaagaacaccgtgtacctccagatgaacagcctgaagccagaggacaccgccgtgtactattgtgctgctggcgtgtccttcggcagcagatggctgggagattattggggccagggcacccaagtgaccgtgtcatctacgcgtaccacgacgccagcgccgcgaccaccaacaccggcgcccaccatcgcgtcgcagcccctgtccctgcgcccagaggcgtgccggccagcggcggggggcgcagtgcacacgagggggctggacttcgcctgtgacatctacatctgggcgcccttggccgggacttgtggggtccttctcctgtcactggttatcaccctttactgcaaacggggcagaaagaaactcctgtatatattcaaacaaccatttatgagaccagtacaaactactcaagaggaagatggctgtagctgccgatttccagaagaagaagaaggaggatgtgaactgagagtgaagttcagcaggagcgcagacgcccccgcgtaccagcagggccagaaccagctctataacgagctgaatctaggacgaagagaggagtacgatgttttggacaagagacgtggccgggaccctgagatggggggaaagccgagaaggaagaaccctcaggaaggcctgtacaatgaactgcagaaagataagatggcggaggcctacagtgagattgggatgaaaggcgagcgccggaggggcaaggggcacgatggcctttaccagggtctcagtacagccaccaaggacacctacgacgcccttcacatgcaggccctgccccctcgctaa

SEQ ID NO: 9064 - DNA, 1101 bp, synthetic construct
  source 1..1101: mol_type = other DNA
atggccttaccagtgaccgccttgctcctgccgctggccttgctgctccacgccgccaggccgttcgaacaggttcagctgcaagagtctggcggaggacttgctcaagctggcggaagcctgagactgtcttgtgccgcctctggcagaaccttcagcatgggctggtttagacaggcccctggcaaagagagagagttcgtcgccgccatcacatacagcggcggcagcccttactacgcctcttctgtcagaggccggttcaccatcagccgggacaacgccaagaacaccgtgtacctccagatgaacagcctgaagccagaggacaccgccgtgtactactgtgccgccaatccaacctacagcagcgactggaatgccgagaattggggccagggcacccaagtgacagtgtctagtacgcgtaccacgacgccagcgccgcgaccaccaacaccggcgcccaccatcgcgtcgcagcccctgtccctgcgcccagaggcgtgccggccagcggcggggggcgcagtgcacacgagggggctggacttcgcctgtgacatctacatctgggcgcccttggccgggacttgtggggtccttctcctgtcactggttatcaccctttactgcaaacggggcagaaagaaactcctgtatatattcaaacaaccatttatgagaccagtacaaactactcaagaggaagatggctgtagctgccgatttccagaagaagaagaaggaggatgtgaactgagagtgaagttcagcaggagcgcagacgcccccgcgtaccagcagggccagaaccagctctataacgagctgaatctaggacgaagagaggagtacgatgttttggacaagagacgtggccgggaccctgagatggggggaaagccgagaaggaagaaccctcaggaaggcctgtacaatgaactgcagaaagataagatggcggaggcctacagtgagattgggatgaaaggcgagcgccggaggggcaaggggcacgatggcctttaccagggtctcagtacagccaccaaggacacctacgacgcccttcacatgcaggccctgccccctcgctaa

SEQ ID NO: 9065 - DNA, 1101 bp, synthetic construct
  source 1..1101: mol_type = other DNA
atggccttaccagtgaccgccttgctcctgccgctggccttgctgctccacgccgccaggccgttcgaacaggttcagctgcaagagtctggcggaggacttgctcaagctggcggaagcctgagactgtcttgtgccgcctctggcagaaccttcagcatgggctggtttagacaggcccctggcaaagagagagagttcgtcgccgccatcacatacagcggcgccagcccttactacgcctcttctgtcagaggccggttcaccatcagccgggacaacgccaagaacaccgtgtacctccagatgaacagcctgaagccagaggacaccgccgtgtactactgtgccgccaatccaacctacggcagcgactggaatgccgagaattggggccagggcacccaagtgacagtgtctagtacgcgtaccacgacgccagcgccgcgaccaccaacaccggcgcccaccatcgcgtcgcagcccctgtccctgcgcccagaggcgtgccggccagcggcggggggcgcagtgcacacgagggggctggacttcgcctgtgacatctacatctgggcgcccttggccgggacttgtggggtccttctcctgtcactggttatcaccctttactgcaaacggggcagaaagaaactcctgtatatattcaaacaaccatttatgagaccagtacaaactactcaagaggaagatggctgtagctgccgatttccagaagaagaagaaggaggatgtgaactgagagtgaagttcagcaggagcgcagacgcccccgcgtaccagcagggccagaaccagctctataacgagctgaatctaggacgaagagaggagtacgatgttttggacaagagacgtggccgggaccctgagatggggggaaagccgagaaggaagaaccctcaggaaggcctgtacaatgaactgcagaaagataagatggcggaggcctacagtgagattgggatgaaaggcgagcgccggaggggcaaggggcacgatggcctttaccagggtctcagtacagccaccaaggacacctacgacgcccttcacatgcaggccctgccccctcgctaa

SEQ ID NO: 9066 - DNA, 1101 bp, synthetic construct
  source 1..1101: mol_type = other DNA
atggccttaccagtgaccgccttgctcctgccgctggccttgctgctccacgccgccaggccgttcgaacaggttcagctgcaagagtctggcggaggacttgctcaagctggcggaagcctgagactgtcttgtgccgcctctggcagaaccttcagcatgggctggtttagacaggcccctggcaaagagagagagttcgtcgccgccatcacatacagcggcgccagcccttactacgcctcttctgtcagaggccggttcaccatcagccgggacaacgccaagaacaccgtgtacctccagatgaacagcctgaagccagaggacaccgccgtgtactactgtgccgccaatccaacctacagcagcgactggaatgccgagaattggggccagggcacccaagtgacagtgtctagtacgcgtaccacgacgccagcgccgcgaccaccaacaccggcgcccaccatcgcgtcgcagcccctgtccctgcgcccagaggcgtgccggccagcggcggggggcgcagtgcacacgagggggctggacttcgcctgtgacatctacatctgggcgcccttggccgggacttgtggggtccttctcctgtcactggttatcaccctttactgcaaacggggcagaaagaaactcctgtatatattcaaacaaccatttatgagaccagtacaaactactcaagaggaagatggctgtagctgccgatttccagaagaagaagaaggaggatgtgaactgagagtgaagttcagcaggagcgcagacgcccccgcgtaccagcagggccagaaccagctctataacgagctgaatctaggacgaagagaggagtacgatgttttggacaagagacgtggccgggaccctgagatggggggaaagccgagaaggaagaaccctcaggaaggcctgtacaatgaactgcagaaagataagatggcggaggcctacagtgagattgggatgaaaggcgagcgccggaggggcaaggggcacgatggcctttaccagggtctcagtacagccaccaaggacacctacgacgcccttcacatgcaggccctgccccctcgctaa

SEQ ID NO: 9067 - DNA, 1827 bp, synthetic construct
  source 1..1827: mol_type = other DNA
atggccttaccagtgaccgccttgctcctgccgctggccttgctgctccacgccgccaggccgttcgaacaggttcagctgcaagagtctggcggaggacttgctcaagctggcggaagcctgagactgtcttgtgccgcctctggcagaaccttcagcatgggctggtttagacaggcccctggcaaagagagagagttcgtcgccgccatcacatacagcggcggcagcccttactacgcctcttctgtcagaggccggttcaccatcagccgggacaacgccaagaacaccgtgtacctccagatgaacagcctgaagccagaggacaccgccgtgtactactgtgccgccaatccaacctacagcagcgactggaatgccgagaattggggccagggcacccaagtgacagtgtctagtacgcgtggaggcagtggtgtcttcacactcgaagatttcgttggggactggcgacagacagccggctacaacctggaccaagtccttgaacagggaggtgtgtccagtttgtttcagaatctcggggtgtccgtaactccgatccaaaggattgtcctgagcggtgaaaatgggctgaagatcgacatccatgtcatcatcccgtatgaaggtctgagcggcgaccaaatgggccagatcgaaaaaatttttaaggtggtgtaccctgtggatgatcatcactttaaggtgatcctgcactatggcacactggtaatcgacggggttacgccgaacatgatcgactatttcggacggccctatgaaggcatcgccgtgttcgacggcaaaaagatcactgtaacagggaccctgtggaacggcaacaaaattatcgacgagcgcctgatcaaccccgacggctccctgctgttccgagtaaccatcaacggagtgaccggctggcggctgtgcgaacgcattctggcgctcgagggaggcagctggagccaccctcagtttgaaaaagactacaaagacgatgacgataagggatcagattacaaggatgatgatgacaaggggtcagattataaagacgacgatgataaagggagcgactacaaggacgacgatgacaaggcctggtcccatccccagttcgagaaacaccatcaccaccaccatcatcacactagtggctccggcgagggcagaggaagtctactaacctgcggagatgtggaagaaaatcctggcccacatatgaccgagtacaagcccacggtgcgcctcgccacccgcgacgacgtccccagggccgtacgcaccctcgccgccgcgttcgccgactaccccgccacgcgccacaccgtcgatccggaccgccacatcgagcgggtcaccgagctgcaagaactcttcctcacgcgcgtcgggctcgacatcggcaaggtgtgggtcgcggacgacggcgccgcggtggcggtctggaccacgccggagagcgtcgaagcgggggcggtgttcgccgagatcggcccgcgcatggccgagttgagcggttcccggctggccgcgcagcaacagatggaaggcctcctggcgccgcaccggcccaaggagcccgcgtggttcctggccaccgtcggcgtctcgcccgaccaccagggcaagggtctgggcagcgccgtcgtgctccccggagtggaggcggccgagcgcgccggggtgcccgccttcctggagacctccgcgccccgcaacctccccttctacgagcggctcggcttcaccgtcaccgccgacgtcgaggtgcccgaaggaccgcgcacctggtgcatgacccgcaagcccggtgcctga

SEQ ID NO: 9068 - DNA, 1827 bp, synthetic construct
  source 1..1827: mol_type = other DNA
atggccttaccagtgaccgccttgctcctgccgctggccttgctgctccacgccgccaggccgttcgaacaggttcagctgcaagagtctggcggaggacttgctcaagctggcggaagcctgagactgtcttgtgccgcctctggcagaaccttcagcatgggctggtttagacaggcccctggcaaagagagagagttcgtcgccgccatcacatacagcggcgccagcccttactacgcctcttctgtcagaggccggttcaccatcagccgggacaacgccaagaacaccgtgtacctccagatgaacagcctgaagccagaggacaccgccgtgtactactgtgccgccaatccaacctacagcagcgactggaatgccgagaattggggccagggcacccaagtgacagtgtctagtacgcgtggaggcagtggtgtcttcacactcgaagatttcgttggggactggcgacagacagccggctacaacctggaccaagtccttgaacagggaggtgtgtccagtttgtttcagaatctcggggtgtccgtaactccgatccaaaggattgtcctgagcggtgaaaatgggctgaagatcgacatccatgtcatcatcccgtatgaaggtctgagcggcgaccaaatgggccagatcgaaaaaatttttaaggtggtgtaccctgtggatgatcatcactttaaggtgatcctgcactatggcacactggtaatcgacggggttacgccgaacatgatcgactatttcggacggccctatgaaggcatcgccgtgttcgacggcaaaaagatcactgtaacagggaccctgtggaacggcaacaaaattatcgacgagcgcctgatcaaccccgacggctccctgctgttccgagtaaccatcaacggagtgaccggctggcggctgtgcgaacgcattctggcgctcgagggaggcagctggagccaccctcagtttgaaaaagactacaaagacgatgacgataagggatcagattacaaggatgatgatgacaaggggtcagattataaagacgacgatgataaagggagcgactacaaggacgacgatgacaaggcctggtcccatccccagttcgagaaacaccatcaccaccaccatcatcacactagtggctccggcgagggcagaggaagtctactaacctgcggagatgtggaagaaaatcctggcccacatatgaccgagtacaagcccacggtgcgcctcgccacccgcgacgacgtccccagggccgtacgcaccctcgccgccgcgttcgccgactaccccgccacgcgccacaccgtcgatccggaccgccacatcgagcgggtcaccgagctgcaagaactcttcctcacgcgcgtcgggctcgacatcggcaaggtgtgggtcgcggacgacggcgccgcggtggcggtctggaccacgccggagagcgtcgaagcgggggcggtgttcgccgagatcggcccgcgcatggccgagttgagcggttcccggctggccgcgcagcaacagatggaaggcctcctggcgccgcaccggcccaaggagcccgcgtggttcctggccaccgtcggcgtctcgcccgaccaccagggcaagggtctgggcagcgccgtcgtgctccccggagtggaggcggccgagcgcgccggggtgcccgccttcctggagacctccgcgccccgcaacctccccttctacgagcggctcggcttcaccgtcaccgccgacgtcgaggtgcccgaaggaccgcgcacctggtgcatgacccgcaagcccggtgcctga

SEQ ID NO: 9069 - DNA, 1827 bp, synthetic construct
  source 1..1827: mol_type = other DNA
atggccttaccagtgaccgccttgctcctgccgctggccttgctgctccacgccgccaggccgttcgaacaggttcagctgcaagagtctggcggaggacttgctcaagctggcggaagcctgagactgtcttgtgccgcctctggcagaaccttcagcatgggctggtttagacaggcccctggcaaagagagagagttcgtcgccgccatcacatacagcggcgccagcccttactacgcctcttctgtcagaggccggttcaccatcagccgggacaacgccaagaacaccgtgtacctccagatgaacagcctgaagccagaggacaccgccgtgtactactgtgccgccaatccaacctacggcagcgactggaatgccgagtactggggccagggcacccaagtgacagtgtctagtacgcgtggaggcagtggtgtcttcacactcgaagatttcgttggggactggcgacagacagccggctacaacctggaccaagtccttgaacagggaggtgtgtccagtttgtttcagaatctcggggtgtccgtaactccgatccaaaggattgtcctgagcggtgaaaatgggctgaagatcgacatccatgtcatcatcccgtatgaaggtctgagcggcgaccaaatgggccagatcgaaaaaatttttaaggtggtgtaccctgtggatgatcatcactttaaggtgatcctgcactatggcacactggtaatcgacggggttacgccgaacatgatcgactatttcggacggccctatgaaggcatcgccgtgttcgacggcaaaaagatcactgtaacagggaccctgtggaacggcaacaaaattatcgacgagcgcctgatcaaccccgacggctccctgctgttccgagtaaccatcaacggagtgaccggctggcggctgtgcgaacgcattctggcgctcgagggaggcagctggagccaccctcagtttgaaaaagactacaaagacgatgacgataagggatcagattacaaggatgatgatgacaaggggtcagattataaagacgacgatgataaagggagcgactacaaggacgacgatgacaaggcctggtcccatccccagttcgagaaacaccatcaccaccaccatcatcacactagtggctccggcgagggcagaggaagtctactaacctgcggagatgtggaagaaaatcctggcccacatatgaccgagtacaagcccacggtgcgcctcgccacccgcgacgacgtccccagggccgtacgcaccctcgccgccgcgttcgccgactaccccgccacgcgccacaccgtcgatccggaccgccacatcgagcgggtcaccgagctgcaagaactcttcctcacgcgcgtcgggctcgacatcggcaaggtgtgggtcgcggacgacggcgccgcggtggcggtctggaccacgccggagagcgtcgaagcgggggcggtgttcgccgagatcggcccgcgcatggccgagttgagcggttcccggctggccgcgcagcaacagatggaaggcctcctggcgccgcaccggcccaaggagcccgcgtggttcctggccaccgtcggcgtctcgcccgaccaccagggcaagggtctgggcagcgccgtcgtgctccccggagtggaggcggccgagcgcgccggggtgcccgccttcctggagacctccgcgccccgcaacctccccttctacgagcggctcggcttcaccgtcaccgccgacgtcgaggtgcccgaaggaccgcgcacctggtgcatgacccgcaagcccggtgcctga

SEQ ID NO: 9070 - DNA, 1830 bp, synthetic construct
  source 1..1830: mol_type = other DNA
atggccctgcctgtgacagctctgctgctgcctctggcactgctgctgcacgccgccagacctcaggttcagctgcaagagtctggcggaggactggttcaagctggcggaagcctgagactgtcttgtgctgccagcggcagatccttcagcagcgtgaacatgggctggttcagacaggcccctggcaaagagagagagttcgtcgccgccattgattggagcggcggcagcccttactacaccgattctgtgaagggcagattcaccatcagccgggacaacagcaagaacaccgtgtacctccagatgaacagcctgaagccagaggacaccgccgtgtactattgtgctgctggcgtgtccttcggcagcagatggctgggagattattggggccagggcacccaagtgaccgtgtcatctacgcgtggaggcagtggtgtcttcacactcgaagatttcgttggggactggcgacagacagccggctacaacctggaccaagtccttgaacagggaggtgtgtccagtttgtttcagaatctcggggtgtccgtaactccgatccaaaggattgtcctgagcggtgaaaatgggctgaagatcgacatccatgtcatcatcccgtatgaaggtctgagcggcgaccaaatgggccagatcgaaaaaatttttaaggtggtgtaccctgtggatgatcatcactttaaggtgatcctgcactatggcacactggtaatcgacggggttacgccgaacatgatcgactatttcggacggccctatgaaggcatcgccgtgttcgacggcaaaaagatcactgtaacagggaccctgtggaacggcaacaaaattatcgacgagcgcctgatcaaccccgacggctccctgctgttccgagtaaccatcaacggagtgaccggctggcggctgtgcgaacgcattctggcgctcgagggaggcagctggagccaccctcagtttgaaaaagactacaaagacgatgacgataagggatcagattacaaggatgatgatgacaaggggtcagattataaagacgacgatgataaagggagcgactacaaggacgacgatgacaaggcctggtcccatccccagttcgagaaacaccatcaccaccaccatcatcacactagtggctccggcgagggcagaggaagtctactaacctgcggagatgtggaagaaaatcctggcccacatatgaccgagtacaagcccacggtgcgcctcgccacccgcgacgacgtccccagggccgtacgcaccctcgccgccgcgttcgccgactaccccgccacgcgccacaccgtcgatccggaccgccacatcgagcgggtcaccgagctgcaagaactcttcctcacgcgcgtcgggctcgacatcggcaaggtgtgggtcgcggacgacggcgccgcggtggcggtctggaccacgccggagagcgtcgaagcgggggcggtgttcgccgagatcggcccgcgcatggccgagttgagcggttcccggctggccgcgcagcaacagatggaaggcctcctggcgccgcaccggcccaaggagcccgcgtggttcctggccaccgtcggcgtctcgcccgaccaccagggcaagggtctgggcagcgccgtcgtgctccccggagtggaggcggccgagcgcgccggggtgcccgccttcctggagacctccgcgccccgcaacctccccttctacgagcggctcggcttcaccgtcaccgccgacgtcgaggtgcccgaaggaccgcgcacctggtgcatgacccgcaagcccggtgcctga

SEQ ID NO: 9071 - DNA, 1845 bp, synthetic construct
  source 1..1845: mol_type = other DNA
atggccttaccagtgaccgccttgctcctgccgctggccttgctgctccacgccgccaggccggcatgccaggttcagctgcaagagtctggccctggcctggtcaagcctagccaaacactgagcctgacctgtaccgtgtctggcggctctatcaccaccggcgagttctactggaactggttcagacagcctcctggcaaaggactggaatggatgggagccattgccgccagcggcagcacaacatacagccctagcttcgagagccggaccagcatcagcagagacaccagcaagaatcagttcagcctgaagctgagcagcgtgacagccgccgatacagccgtgtattactgcggcagatcctttggagtggccgccgtgacaaccggccagaatagaggacagggcaccctggtcacagtgtctagcggtaccacgcgtggaggcagtggtgtcttcacactcgaagatttcgttggggactggcgacagacagccggctacaacctggaccaagtccttgaacagggaggtgtgtccagtttgtttcagaatctcggggtgtccgtaactccgatccaaaggattgtcctgagcggtgaaaatgggctgaagatcgacatccatgtcatcatcccgtatgaaggtctgagcggcgaccaaatgggccagatcgaaaaaatttttaaggtggtgtaccctgtggatgatcatcactttaaggtgatcctgcactatggcacactggtaatcgacggggttacgccgaacatgatcgactatttcggacggccctatgaaggcatcgccgtgttcgacggcaaaaagatcactgtaacagggaccctgtggaacggcaacaaaattatcgacgagcgcctgatcaaccccgacggctccctgctgttccgagtaaccatcaacggagtgaccggctggcggctgtgcgaacgcattctggcgctcgagggaggcagctggagccaccctcagtttgaaaaagactacaaagacgatgacgataagggatcagattacaaggatgatgatgacaaggggtcagattataaagacgacgatgataaagggagcgactacaaggacgacgatgacaaggcctggtcccatccccagttcgagaaacaccatcaccaccaccatcatcacactagtggctccggcgagggcagaggaagtctactaacctgcggagatgtggaagaaaatcctggcccacatatgaccgagtacaagcccacggtgcgcctcgccacccgcgacgacgtccccagggccgtacgcaccctcgccgccgcgttcgccgactaccccgccacgcgccacaccgtcgatccggaccgccacatcgagcgggtcaccgagctgcaagaactcttcctcacgcgcgtcgggctcgacatcggcaaggtgtgggtcgcggacgacggcgccgcggtggcggtctggaccacgccggagagcgtcgaagcgggggcggtgttcgccgagatcggcccgcgcatggccgagttgagcggttcccggctggccgcgcagcaacagatggaaggcctcctggcgccgcaccggcccaaggagcccgcgtggttcctggccaccgtcggcgtctcgcccgaccaccagggcaagggtctgggcagcgccgtcgtgctccccggagtggaggcggccgagcgcgccggggtgcccgccttcctggagacctccgcgccccgcaacctccccttctacgagcggctcggcttcaccgtcaccgccgacgtcgaggtgcccgaaggaccgcgcacctggtgcatgacccgcaagcccggtgcctga

SEQ ID NO: 9072 - DNA, 1833 bp, synthetic construct
  source 1..1833: mol_type = other DNA
atggccttaccagtgaccgccttgctcctgccgctggccttgctgctccacgccgccaggccgcaggttcagctgcaagagtctggccctggcctggtcaagcctagccaaacactgagcctgacctgtaccgtgtctggcggctctatcaccaccggcgagttctactggaactggttcagacagcctcctggcaaaggactggaatggatgggagccgtggccgccagcggcagcacaacatacagccctagcttcgagagccggaccagcatcagcagagacaccagcaagaatcagttcagcctgaagctgagcagcgtgacagccgccgatacagccctgtattactgcggcagatcctttggagtggccgccattacaaccggccagaatagaggacagggcaccctggtcacagtgtctagcacgcgtggaggcagtggtgtcttcacactcgaagatttcgttggggactggcgacagacagccggctacaacctggaccaagtccttgaacagggaggtgtgtccagtttgtttcagaatctcggggtgtccgtaactccgatccaaaggattgtcctgagcggtgaaaatgggctgaagatcgacatccatgtcatcatcccgtatgaaggtctgagcggcgaccaaatgggccagatcgaaaaaatttttaaggtggtgtaccctgtggatgatcatcactttaaggtgatcctgcactatggcacactggtaatcgacggggttacgccgaacatgatcgactatttcggacggccctatgaaggcatcgccgtgttcgacggcaaaaagatcactgtaacagggaccctgtggaacggcaacaaaattatcgacgagcgcctgatcaaccccgacggctccctgctgttccgagtaaccatcaacggagtgaccggctggcggctgtgcgaacgcattctggcgctcgagggaggcagctggagccaccctcagtttgaaaaagactacaaagacgatgacgataagggatcagattacaaggatgatgatgacaaggggtcagattataaagacgacgatgataaagggagcgactacaaggacgacgatgacaaggcctggtcccatccccagttcgagaaacaccatcaccaccaccatcatcacactagtggctccggcgagggcagaggaagtctactaacctgcggagatgtggaagaaaatcctggcccacatatgaccgagtacaagcccacggtgcgcctcgccacccgcgacgacgtccccagggccgtacgcaccctcgccgccgcgttcgccgactaccccgccacgcgccacaccgtcgatccggaccgccacatcgagcgggtcaccgagctgcaagaactcttcctcacgcgcgtcgggctcgacatcggcaaggtgtgggtcgcggacgacggcgccgcggtggcggtctggaccacgccggagagcgtcgaagcgggggcggtgttcgccgagatcggcccgcgcatggccgagttgagcggttcccggctggccgcgcagcaacagatggaaggcctcctggcgccgcaccggcccaaggagcccgcgtggttcctggccaccgtcggcgtctcgcccgaccaccagggcaagggtctgggcagcgccgtcgtgctccccggagtggaggcggccgagcgcgccggggtgcccgccttcctggagacctccgcgccccgcaacctccccttctacgagcggctcggcttcaccgtcaccgccgacgtcgaggtgcccgaaggaccgcgcacctggtgcatgacccgcaagcccggtgcctga

SEQ ID NO: 9073 - DNA, 1113 bp, synthetic construct
  source 1..1113: mol_type = other DNA
atggccttaccagtgaccgccttgctcctgccgctggccttgctgctccacgccgccaggccgttcgaacaggttcagctgcaagagtctggccctggcctggtcaagcctagccaaacactgagcctgacctgtaccgtgtctggcgcctctatcaccaccggcgagttctactggaactggttcagacagcctcctggcaaaggactggaatggatgggagccattgccgccagcggcagcacaacatacagccctagcttcgagagccggaccagcatcagcagagacaccagcaagaatcagttcagcctgaagctgagcagcgtgacagccgccgatacagccgtgtattactgcggcagatcctttggagtggccgccgtgacaaccggccagaatagaggacagggcaccctggtcacagtgtctagcacgcgtaccacgacgccagcgccgcgaccaccaacaccggcgcccaccatcgcgtcgcagcccctgtccctgcgcccagaggcgtgccggccagcggcggggggcgcagtgcacacgagggggctggacttcgcctgtgacatctacatctgggcgcccttggccgggacttgtggggtccttctcctgtcactggttatcaccctttactgcaaacggggcagaaagaaactcctgtatatattcaaacaaccatttatgagaccagtacaaactactcaagaggaagatggctgtagctgccgatttccagaagaagaagaaggaggatgtgaactgagagtgaagttcagcaggagcgcagacgcccccgcgtaccagcagggccagaaccagctctataacgagctgaatctaggacgaagagaggagtacgatgttttggacaagagacgtggccgggaccctgagatggggggaaagccgagaaggaagaaccctcaggaaggcctgtacaatgaactgcagaaagataagatggcggaggcctacagtgagattgggatgaaaggcgagcgccggaggggcaaggggcacgatggcctttaccagggtctcagtacagccaccaaggacacctacgacgcccttcacatgcaggccctgccccctcgctaa

SEQ ID NO: 9074 - DNA, 1113 bp, synthetic construct
  source 1..1113: mol_type = other DNA
atggccttaccagtgaccgccttgctcctgccgctggccttgctgctccacgccgccaggccgttcgaacaggttcagctgcaagagtctggccctggcctggtcaagcctagccaaacactgagcctgacctgtaccgtgtctggcgcctctatcaccaccggcgagttctactggaactggttcagacagcctcctggcaaaggactggaatggatgggagccattgccgccagcggcagcacaacatacagccctagcttcgagagccggaccagcatcagcagagacaccagcaagaatcagttcagcctgaagctgagcagcgtgacagccgccgatacagccgtgtattactgcggcagatcctacggagtggccgccgtgacaaccggccagaatagaggacagggcaccctggtcacagtgtctagcacgcgtaccacgacgccagcgccgcgaccaccaacaccggcgcccaccatcgcgtcgcagcccctgtccctgcgcccagaggcgtgccggccagcggcggggggcgcagtgcacacgagggggctggacttcgcctgtgacatctacatctgggcgcccttggccgggacttgtggggtccttctcctgtcactggttatcaccctttactgcaaacggggcagaaagaaactcctgtatatattcaaacaaccatttatgagaccagtacaaactactcaagaggaagatggctgtagctgccgatttccagaagaagaagaaggaggatgtgaactgagagtgaagttcagcaggagcgcagacgcccccgcgtaccagcagggccagaaccagctctataacgagctgaatctaggacgaagagaggagtacgatgttttggacaagagacgtggccgggaccctgagatggggggaaagccgagaaggaagaaccctcaggaaggcctgtacaatgaactgcagaaagataagatggcggaggcctacagtgagattgggatgaaaggcgagcgccggaggggcaaggggcacgatggcctttaccagggtctcagtacagccaccaaggacacctacgacgcccttcacatgcaggccctgccccctcgctaa

SEQ ID NO: 9075 - DNA, 1113 bp, synthetic construct
  source 1..1113: mol_type = other DNA
atggccttaccagtgaccgccttgctcctgccgctggccttgctgctccacgccgccaggccgttcgaacaggttcagctgcaagagtctggccctggcctggtcaagcctagccaaacactgagcctgacctgtaccgtgtctggcgcctctatcaccaccggcgagttctactggaactggttcagacagcctcctggcaaaggactggaatggatgggagccattgccgccagcggcagcacaacatacagccctagcttcgagagccggaccagcatcagcagagacaccagcaagaatcagttcagcctgaagctgagcagcgtgacagccgccgatacagccgtgtattactgcggcagatcctttggagtggccgccattacaaccggccagaatagaggacagggcaccctggtcacagtgtctagcacgcgtaccacgacgccagcgccgcgaccaccaacaccggcgcccaccatcgcgtcgcagcccctgtccctgcgcccagaggcgtgccggccagcggcggggggcgcagtgcacacgagggggctggacttcgcctgtgacatctacatctgggcgcccttggccgggacttgtggggtccttctcctgtcactggttatcaccctttactgcaaacggggcagaaagaaactcctgtatatattcaaacaaccatttatgagaccagtacaaactactcaagaggaagatggctgtagctgccgatttccagaagaagaagaaggaggatgtgaactgagagtgaagttcagcaggagcgcagacgcccccgcgtaccagcagggccagaaccagctctataacgagctgaatctaggacgaagagaggagtacgatgttttggacaagagacgtggccgggaccctgagatggggggaaagccgagaaggaagaaccctcaggaaggcctgtacaatgaactgcagaaagataagatggcggaggcctacagtgagattgggatgaaaggcgagcgccggaggggcaaggggcacgatggcctttaccagggtctcagtacagccaccaaggacacctacgacgcccttcacatgcaggccctgccccctcgctaa

SEQ ID NO: 9076 - DNA, 1113 bp, synthetic construct
  source 1..1113: mol_type = other DNA
atggccttaccagtgaccgccttgctcctgccgctggccttgctgctccacgccgccaggccgttcgaacaggttcagctgcaagagtctggccctggcctggtcaagcctagccaaacactgagcctgacctgtaccgtgtctggcgcctctatcaccaccggcgagtactactggaactggttcagacagcctcctggcaaaggactggaatggatgggagccattgccgccagcggcagcacaacatacagccctagcttcgagagccggaccagcatcagcagagacaccagcaagaatcagttcagcctgaagctgagcagcgtgacagccgccgatacagccgtgtattactgcggcagatcctttggagtggccgccattacaaccggccagaatagaggacagggcaccctggtcacagtgtctagcacgcgtaccacgacgccagcgccgcgaccaccaacaccggcgcccaccatcgcgtcgcagcccctgtccctgcgcccagaggcgtgccggccagcggcggggggcgcagtgcacacgagggggctggacttcgcctgtgacatctacatctgggcgcccttggccgggacttgtggggtccttctcctgtcactggttatcaccctttactgcaaacggggcagaaagaaactcctgtatatattcaaacaaccatttatgagaccagtacaaactactcaagaggaagatggctgtagctgccgatttccagaagaagaagaaggaggatgtgaactgagagtgaagttcagcaggagcgcagacgcccccgcgtaccagcagggccagaaccagctctataacgagctgaatctaggacgaagagaggagtacgatgttttggacaagagacgtggccgggaccctgagatggggggaaagccgagaaggaagaaccctcaggaaggcctgtacaatgaactgcagaaagataagatggcggaggcctacagtgagattgggatgaaaggcgagcgccggaggggcaaggggcacgatggcctttaccagggtctcagtacagccaccaaggacacctacgacgcccttcacatgcaggccctgccccctcgctaa

SEQ ID NO: 9077 - DNA, 1113 bp, synthetic construct
  source 1..1113: mol_type = other DNA
atggccttaccagtgaccgccttgctcctgccgctggccttgctgctccacgccgccaggccgttcgaacaggttcagctgcaagagtctggccctggcctggtcaagcctagccaaacactgagcctgacctgtaccgtgtctggcgcctctatcaccaccggcgagttctactggaactggttcagacagcctcctggcaaaggactggaatggatgggagccattgccgccagcggcagcacaacatacagccctagcttcgagagccggaccagcatcagcagagacaccagcaagaatcagttcagcctgaagctgagcagcgtgacagccgccgatacagccgtgtattactgcggcagatcctttggaatcgccgccgtgacaaccggccagaatagaggacagggcaccctggtcacagtgtctagcacgcgtaccacgacgccagcgccgcgaccaccaacaccggcgcccaccatcgcgtcgcagcccctgtccctgcgcccagaggcgtgccggccagcggcggggggcgcagtgcacacgagggggctggacttcgcctgtgacatctacatctgggcgcccttggccgggacttgtggggtccttctcctgtcactggttatcaccctttactgcaaacggggcagaaagaaactcctgtatatattcaaacaaccatttatgagaccagtacaaactactcaagaggaagatggctgtagctgccgatttccagaagaagaagaaggaggatgtgaactgagagtgaagttcagcaggagcgcagacgcccccgcgtaccagcagggccagaaccagctctataacgagctgaatctaggacgaagagaggagtacgatgttttggacaagagacgtggccgggaccctgagatggggggaaagccgagaaggaagaaccctcaggaaggcctgtacaatgaactgcagaaagataagatggcggaggcctacagtgagattgggatgaaaggcgagcgccggaggggcaaggggcacgatggcctttaccagggtctcagtacagccaccaaggacacctacgacgcccttcacatgcaggccctgccccctcgctaa

SEQ ID NO: 9078 - DNA, 1113 bp, synthetic construct
  source 1..1113: mol_type = other DNA
atggccttaccagtgaccgccttgctcctgccgctggccttgctgctccacgccgccaggccgttcgaacaggttcagctgcaagagtctggccctggcctggtcaagcctagccaaacactgagcctgacctgtaccgtgtctggcgcctctatcaccaccggcgagttctactggaactggttcagacagcctcctggcaaaggactggaatggatgggagccattgccgccagcggcgccacaacatacagccctagcttcgagagccggaccagcatcagcagagacaccagcaagaatcagttcagcctgaagctgagcagcgtgacagccgccgatacagccgtgtattactgcggcagatcctttggagtggccgccgtgacaaccggccagaatagaggacagggcaccctggtcacagtgtctagcacgcgtaccacgacgccagcgccgcgaccaccaacaccggcgcccaccatcgcgtcgcagcccctgtccctgcgcccagaggcgtgccggccagcggcggggggcgcagtgcacacgagggggctggacttcgcctgtgacatctacatctgggcgcccttggccgggacttgtggggtccttctcctgtcactggttatcaccctttactgcaaacggggcagaaagaaactcctgtatatattcaaacaaccatttatgagaccagtacaaactactcaagaggaagatggctgtagctgccgatttccagaagaagaagaaggaggatgtgaactgagagtgaagttcagcaggagcgcagacgcccccgcgtaccagcagggccagaaccagctctataacgagctgaatctaggacgaagagaggagtacgatgttttggacaagagacgtggccgggaccctgagatggggggaaagccgagaaggaagaaccctcaggaaggcctgtacaatgaactgcagaaagataagatggcggaggcctacagtgagattgggatgaaaggcgagcgccggaggggcaaggggcacgatggcctttaccagggtctcagtacagccaccaaggacacctacgacgcccttcacatgcaggccctgccccctcgctaa

SEQ ID NO: 9079 - DNA, 1113 bp, synthetic construct
  source 1..1113: mol_type = other DNA
atggccttaccagtgaccgccttgctcctgccgctggccttgctgctccacgccgccaggccgttcgaacaggttcagctgcaagagtctggccctggcctggtcaagcctagccaaacactgagcctgacctgtaccgtgtctggcgcctctatcaccaccggcgagtactactggaactggttcagacagcctcctggcaaaggactggaatggatgggagccattgccgccagcggcgccacaacatacagccctagcttcgagagccggaccagcatcagcagagacaccagcaagaatcagttcagcctgaagctgagcagcgtgacagccgccgatacagccgtgtattactgcggcagatcctttggagtggccgccgtgacaaccggccagaatagaggacagggcaccctggtcacagtgtctagcacgcgtaccacgacgccagcgccgcgaccaccaacaccggcgcccaccatcgcgtcgcagcccctgtccctgcgcccagaggcgtgccggccagcggcggggggcgcagtgcacacgagggggctggacttcgcctgtgacatctacatctgggcgcccttggccgggacttgtggggtccttctcctgtcactggttatcaccctttactgcaaacggggcagaaagaaactcctgtatatattcaaacaaccatttatgagaccagtacaaactactcaagaggaagatggctgtagctgccgatttccagaagaagaagaaggaggatgtgaactgagagtgaagttcagcaggagcgcagacgcccccgcgtaccagcagggccagaaccagctctataacgagctgaatctaggacgaagagaggagtacgatgttttggacaagagacgtggccgggaccctgagatggggggaaagccgagaaggaagaaccctcaggaaggcctgtacaatgaactgcagaaagataagatggcggaggcctacagtgagattgggatgaaaggcgagcgccggaggggcaaggggcacgatggcctttaccagggtctcagtacagccaccaaggacacctacgacgcccttcacatgcaggccctgccccctcgctaa

SEQ ID NO: 9080 - DNA, 1839 bp, synthetic construct
  source 1..1839: mol_type = other DNA
atggccttaccagtgaccgccttgctcctgccgctggccttgctgctccacgccgccaggccgttcgaacaggttcagctgcaagagtctggccctggcctggtcaagcctagccaaacactgagcctgacctgtaccgtgtctggcgcctctatcaccaccggcgagttctactggaactggttcagacagcctcctggcaaaggactggaatggatgggagccattgccgccagcggcagcacaacatacagccctagcttcgagagccggaccagcatcagcagagacaccagcaagaatcagttcagcctgaagctgagcagcgtgacagccgccgatacagccgtgtattactgcggcagatcctttggagtggccgccgtgacaaccggccagaatagaggacagggcaccctggtcacagtgtctagcacgcgtggaggcagtggtgtcttcacactcgaagatttcgttggggactggcgacagacagccggctacaacctggaccaagtccttgaacagggaggtgtgtccagtttgtttcagaatctcggggtgtccgtaactccgatccaaaggattgtcctgagcggtgaaaatgggctgaagatcgacatccatgtcatcatcccgtatgaaggtctgagcggcgaccaaatgggccagatcgaaaaaatttttaaggtggtgtaccctgtggatgatcatcactttaaggtgatcctgcactatggcacactggtaatcgacggggttacgccgaacatgatcgactatttcggacggccctatgaaggcatcgccgtgttcgacggcaaaaagatcactgtaacagggaccctgtggaacggcaacaaaattatcgacgagcgcctgatcaaccccgacggctccctgctgttccgagtaaccatcaacggagtgaccggctggcggctgtgcgaacgcattctggcgctcgagggaggcagctggagccaccctcagtttgaaaaagactacaaagacgatgacgataagggatcagattacaaggatgatgatgacaaggggtcagattataaagacgacgatgataaagggagcgactacaaggacgacgatgacaaggcctggtcccatccccagttcgagaaacaccatcaccaccaccatcatcacactagtggctccggcgagggcagaggaagtctactaacctgcggagatgtggaagaaaatcctggcccacatatgaccgagtacaagcccacggtgcgcctcgccacccgcgacgacgtccccagggccgtacgcaccctcgccgccgcgttcgccgactaccccgccacgcgccacaccgtcgatccggaccgccacatcgagcgggtcaccgagctgcaagaactcttcctcacgcgcgtcgggctcgacatcggcaaggtgtgggtcgcggacgacggcgccgcggtggcggtctggaccacgccggagagcgtcgaagcgggggcggtgttcgccgagatcggcccgcgcatggccgagttgagcggttcccggctggccgcgcagcaacagatggaaggcctcctggcgccgcaccggcccaaggagcccgcgtggttcctggccaccgtcggcgtctcgcccgaccaccagggcaagggtctgggcagcgccgtcgtgctccccggagtggaggcggccgagcgcgccggggtgcccgccttcctggagacctccgcgccccgcaacctccccttctacgagcggctcggcttcaccgtcaccgccgacgtcgaggtgcccgaaggaccgcgcacctggtgcatgacccgcaagcccggtgcctga

SEQ ID NO: 9081 - DNA, 1839 bp, synthetic construct
  source 1..1839: mol_type = other DNA
atggccttaccagtgaccgccttgctcctgccgctggccttgctgctccacgccgccaggccgttcgaacaggttcagctgcaagagtctggccctggcctggtcaagcctagccaaacactgagcctgacctgtaccgtgtctggcgcctctatcaccaccggcgagttctactggaactggttcagacagcctcctggcaaaggactggaatggatgggagccattgccgccagcggcagcacaacatacagccctagcttcgagagccggaccagcatcagcagagacaccagcaagaatcagttcagcctgaagctgagcagcgtgacagccgccgatacagccgtgtattactgcggcagatcctacggagtggccgccgtgacaaccggccagaatagaggacagggcaccctggtcacagtgtctagcacgcgtggaggcagtggtgtcttcacactcgaagatttcgttggggactggcgacagacagccggctacaacctggaccaagtccttgaacagggaggtgtgtccagtttgtttcagaatctcggggtgtccgtaactccgatccaaaggattgtcctgagcggtgaaaatgggctgaagatcgacatccatgtcatcatcccgtatgaaggtctgagcggcgaccaaatgggccagatcgaaaaaatttttaaggtggtgtaccctgtggatgatcatcactttaaggtgatcctgcactatggcacactggtaatcgacggggttacgccgaacatgatcgactatttcggacggccctatgaaggcatcgccgtgttcgacggcaaaaagatcactgtaacagggaccctgtggaacggcaacaaaattatcgacgagcgcctgatcaaccccgacggctccctgctgttccgagtaaccatcaacggagtgaccggctggcggctgtgcgaacgcattctggcgctcgagggaggcagctggagccaccctcagtttgaaaaagactacaaagacgatgacgataagggatcagattacaaggatgatgatgacaaggggtcagattataaagacgacgatgataaagggagcgactacaaggacgacgatgacaaggcctggtcccatccccagttcgagaaacaccatcaccaccaccatcatcacactagtggctccggcgagggcagaggaagtctactaacctgcggagatgtggaagaaaatcctggcccacatatgaccgagtacaagcccacggtgcgcctcgccacccgcgacgacgtccccagggccgtacgcaccctcgccgccgcgttcgccgactaccccgccacgcgccacaccgtcgatccggaccgccacatcgagcgggtcaccgagctgcaagaactcttcctcacgcgcgtcgggctcgacatcggcaaggtgtgggtcgcggacgacggcgccgcggtggcggtctggaccacgccggagagcgtcgaagcgggggcggtgttcgccgagatcggcccgcgcatggccgagttgagcggttcccggctggccgcgcagcaacagatggaaggcctcctggcgccgcaccggcccaaggagcccgcgtggttcctggccaccgtcggcgtctcgcccgaccaccagggcaagggtctgggcagcgccgtcgtgctccccggagtggaggcggccgagcgcgccggggtgcccgccttcctggagacctccgcgccccgcaacctccccttctacgagcggctcggcttcaccgtcaccgccgacgtcgaggtgcccgaaggaccgcgcacctggtgcatgacccgcaagcccggtgcctga

SEQ ID NO: 9082 - DNA, 1839 bp, synthetic construct
  source 1..1839: mol_type = other DNA
atggccttaccagtgaccgccttgctcctgccgctggccttgctgctccacgccgccaggccgttcgaacaggttcagctgcaagagtctggccctggcctggtcaagcctagccaaacactgagcctgacctgtaccgtgtctggcgcctctatcaccaccggcgagttctactggaactggttcagacagcctcctggcaaaggactggaatggatgggagccattgccgccagcggcagcacaacatacagccctagcttcgagagccggaccagcatcagcagagacaccagcaagaatcagttcagcctgaagctgagcagcgtgacagccgccgatacagccgtgtattactgcggcagatcctttggaatcgccgccgtgacaaccggccagaatagaggacagggcaccctggtcacagtgtctagcacgcgtggaggcagtggtgtcttcacactcgaagatttcgttggggactggcgacagacagccggctacaacctggaccaagtccttgaacagggaggtgtgtccagtttgtttcagaatctcggggtgtccgtaactccgatccaaaggattgtcctgagcggtgaaaatgggctgaagatcgacatccatgtcatcatcccgtatgaaggtctgagcggcgaccaaatgggccagatcgaaaaaatttttaaggtggtgtaccctgtggatgatcatcactttaaggtgatcctgcactatggcacactggtaatcgacggggttacgccgaacatgatcgactatttcggacggccctatgaaggcatcgccgtgttcgacggcaaaaagatcactgtaacagggaccctgtggaacggcaacaaaattatcgacgagcgcctgatcaaccccgacggctccctgctgttccgagtaaccatcaacggagtgaccggctggcggctgtgcgaacgcattctggcgctcgagggaggcagctggagccaccctcagtttgaaaaagactacaaagacgatgacgataagggatcagattacaaggatgatgatgacaaggggtcagattataaagacgacgatgataaagggagcgactacaaggacgacgatgacaaggcctggtcccatccccagttcgagaaacaccatcaccaccaccatcatcacactagtggctccggcgagggcagaggaagtctactaacctgcggagatgtggaagaaaatcctggcccacatatgaccgagtacaagcccacggtgcgcctcgccacccgcgacgacgtccccagggccgtacgcaccctcgccgccgcgttcgccgactaccccgccacgcgccacaccgtcgatccggaccgccacatcgagcgggtcaccgagctgcaagaactcttcctcacgcgcgtcgggctcgacatcggcaaggtgtgggtcgcggacgacggcgccgcggtggcggtctggaccacgccggagagcgtcgaagcgggggcggtgttcgccgagatcggcccgcgcatggccgagttgagcggttcccggctggccgcgcagcaacagatggaaggcctcctggcgccgcaccggcccaaggagcccgcgtggttcctggccaccgtcggcgtctcgcccgaccaccagggcaagggtctgggcagcgccgtcgtgctccccggagtggaggcggccgagcgcgccggggtgcccgccttcctggagacctccgcgccccgcaacctccccttctacgagcggctcggcttcaccgtcaccgccgacgtcgaggtgcccgaaggaccgcgcacctggtgcatgacccgcaagcccggtgcctga

SEQ ID NO: 9083 - DNA, 1839 bp, synthetic construct
  source 1..1839: mol_type = other DNA
atggccttaccagtgaccgccttgctcctgccgctggccttgctgctccacgccgccaggccgttcgaacaggttcagctgcaagagtctggccctggcctggtcaagcctagccaaacactgagcctgacctgtaccgtgtctggcgcctctatcaccaccggcgagttctactggaactggttcagacagcctcctggcaaaggactggaatggatgggagccattgccgccagcggcgccacaacatacagccctagcttcgagagccggaccagcatcagcagagacaccagcaagaatcagttcagcctgaagctgagcagcgtgacagccgccgatacagccgtgtattactgcggcagatcctttggagtggccgccgtgacaaccggccagaatagaggacagggcaccctggtcacagtgtctagcacgcgtggaggcagtggtgtcttcacactcgaagatttcgttggggactggcgacagacagccggctacaacctggaccaagtccttgaacagggaggtgtgtccagtttgtttcagaatctcggggtgtccgtaactccgatccaaaggattgtcctgagcggtgaaaatgggctgaagatcgacatccatgtcatcatcccgtatgaaggtctgagcggcgaccaaatgggccagatcgaaaaaatttttaaggtggtgtaccctgtggatgatcatcactttaaggtgatcctgcactatggcacactggtaatcgacggggttacgccgaacatgatcgactatttcggacggccctatgaaggcatcgccgtgttcgacggcaaaaagatcactgtaacagggaccctgtggaacggcaacaaaattatcgacgagcgcctgatcaaccccgacggctccctgctgttccgagtaaccatcaacggagtgaccggctggcggctgtgcgaacgcattctggcgctcgagggaggcagctggagccaccctcagtttgaaaaagactacaaagacgatgacgataagggatcagattacaaggatgatgatgacaaggggtcagattataaagacgacgatgataaagggagcgactacaaggacgacgatgacaaggcctggtcccatccccagttcgagaaacaccatcaccaccaccatcatcacactagtggctccggcgagggcagaggaagtctactaacctgcggagatgtggaagaaaatcctggcccacatatgaccgagtacaagcccacggtgcgcctcgccacccgcgacgacgtccccagggccgtacgcaccctcgccgccgcgttcgccgactaccccgccacgcgccacaccgtcgatccggaccgccacatcgagcgggtcaccgagctgcaagaactcttcctcacgcgcgtcgggctcgacatcggcaaggtgtgggtcgcggacgacggcgccgcggtggcggtctggaccacgccggagagcgtcgaagcgggggcggtgttcgccgagatcggcccgcgcatggccgagttgagcggttcccggctggccgcgcagcaacagatggaaggcctcctggcgccgcaccggcccaaggagcccgcgtggttcctggccaccgtcggcgtctcgcccgaccaccagggcaagggtctgggcagcgccgtcgtgctccccggagtggaggcggccgagcgcgccggggtgcccgccttcctggagacctccgcgccccgcaacctccccttctacgagcggctcggcttcaccgtcaccgccgacgtcgaggtgcccgaaggaccgcgcacctggtgcatgacccgcaagcccggtgcctga

SEQ ID NO: 9084 - DNA, 1839 bp, synthetic construct
  source 1..1839: mol_type = other DNA
atggccttaccagtgaccgccttgctcctgccgctggccttgctgctccacgccgccaggccgttcgaacaggttcagctgcaagagtctggccctggcctggtcaagcctagccaaacactgagcctgacctgtaccgtgtctggcgcctctatcaccaccggcgagtactactggaactggttcagacagcctcctggcaaaggactggaatggatgggagccattgccgccagcggcgccacaacatacagccctagcttcgagagccggaccagcatcagcagagacaccagcaagaatcagttcagcctgaagctgagcagcgtgacagccgccgatacagccgtgtattactgcggcagatcctttggagtggccgccgtgacaaccggccagaatagaggacagggcaccctggtcacagtgtctagcacgcgtggaggcagtggtgtcttcacactcgaagatttcgttggggactggcgacagacagccggctacaacctggaccaagtccttgaacagggaggtgtgtccagtttgtttcagaatctcggggtgtccgtaactccgatccaaaggattgtcctgagcggtgaaaatgggctgaagatcgacatccatgtcatcatcccgtatgaaggtctgagcggcgaccaaatgggccagatcgaaaaaatttttaaggtggtgtaccctgtggatgatcatcactttaaggtgatcctgcactatggcacactggtaatcgacggggttacgccgaacatgatcgactatttcggacggccctatgaaggcatcgccgtgttcgacggcaaaaagatcactgtaacagggaccctgtggaacggcaacaaaattatcgacgagcgcctgatcaaccccgacggctccctgctgttccgagtaaccatcaacggagtgaccggctggcggctgtgcgaacgcattctggcgctcgagggaggcagctggagccaccctcagtttgaaaaagactacaaagacgatgacgataagggatcagattacaaggatgatgatgacaaggggtcagattataaagacgacgatgataaagggagcgactacaaggacgacgatgacaaggcctggtcccatccccagttcgagaaacaccatcaccaccaccatcatcacactagtggctccggcgagggcagaggaagtctactaacctgcggagatgtggaagaaaatcctggcccacatatgaccgagtacaagcccacggtgcgcctcgccacccgcgacgacgtccccagggccgtacgcaccctcgccgccgcgttcgccgactaccccgccacgcgccacaccgtcgatccggaccgccacatcgagcgggtcaccgagctgcaagaactcttcctcacgcgcgtcgggctcgacatcggcaaggtgtgggtcgcggacgacggcgccgcggtggcggtctggaccacgccggagagcgtcgaagcgggggcggtgttcgccgagatcggcccgcgcatggccgagttgagcggttcccggctggccgcgcagcaacagatggaaggcctcctggcgccgcaccggcccaaggagcccgcgtggttcctggccaccgtcggcgtctcgcccgaccaccagggcaagggtctgggcagcgccgtcgtgctccccggagtggaggcggccgagcgcgccggggtgcccgccttcctggagacctccgcgccccgcaacctccccttctacgagcggctcggcttcaccgtcaccgccgacgtcgaggtgcccgaaggaccgcgcacctggtgcatgacccgcaagcccggtgcctga

SEQ ID NO: 9085 - DNA, 1839 bp, synthetic construct
  source 1..1839: mol_type = other DNA
atggccttaccagtgaccgccttgctcctgccgctggccttgctgctccacgccgccaggccgttcgaacaggttcagctgcaagagtctggccctggcctggtcaagcctagccaaacactgagcctgacctgtaccgtgtctggcgcctctatcaccaccggcgagttctactggaactggttcagacagcctcctggcaaaggactggaatggatgggagccattgccgccagcggcagcacaacatacagccctagcttcgagagccggaccagcatcagcagagacaccagcaagaatcagttcagcctgaagctgagcagcgtgacagccgccgatacagccgtgtattactgcggcagatcctttggagtggccgccattacaaccggccagaatagaggacagggcaccctggtcacagtgtctagcacgcgtggaggcagtggtgtcttcacactcgaagatttcgttggggactggcgacagacagccggctacaacctggaccaagtccttgaacagggaggtgtgtccagtttgtttcagaatctcggggtgtccgtaactccgatccaaaggattgtcctgagcggtgaaaatgggctgaagatcgacatccatgtcatcatcccgtatgaaggtctgagcggcgaccaaatgggccagatcgaaaaaatttttaaggtggtgtaccctgtggatgatcatcactttaaggtgatcctgcactatggcacactggtaatcgacggggttacgccgaacatgatcgactatttcggacggccctatgaaggcatcgccgtgttcgacggcaaaaagatcactgtaacagggaccctgtggaacggcaacaaaattatcgacgagcgcctgatcaaccccgacggctccctgctgttccgagtaaccatcaacggagtgaccggctggcggctgtgcgaacgcattctggcgctcgagggaggcagctggagccaccctcagtttgaaaaagactacaaagacgatgacgataagggatcagattacaaggatgatgatgacaaggggtcagattataaagacgacgatgataaagggagcgactacaaggacgacgatgacaaggcctggtcccatccccagttcgagaaacaccatcaccaccaccatcatcacactagtggctccggcgagggcagaggaagtctactaacctgcggagatgtggaagaaaatcctggcccacatatgaccgagtacaagcccacggtgcgcctcgccacccgcgacgacgtccccagggccgtacgcaccctcgccgccgcgttcgccgactaccccgccacgcgccacaccgtcgatccggaccgccacatcgagcgggtcaccgagctgcaagaactcttcctcacgcgcgtcgggctcgacatcggcaaggtgtgggtcgcggacgacggcgccgcggtggcggtctggaccacgccggagagcgtcgaagcgggggcggtgttcgccgagatcggcccgcgcatggccgagttgagcggttcccggctggccgcgcagcaacagatggaaggcctcctggcgccgcaccggcccaaggagcccgcgtggttcctggccaccgtcggcgtctcgcccgaccaccagggcaagggtctgggcagcgccgtcgtgctccccggagtggaggcggccgagcgcgccggggtgcccgccttcctggagacctccgcgccccgcaacctccccttctacgagcggctcggcttcaccgtcaccgccgacgtcgaggtgcccgaaggaccgcgcacctggtgcatgacccgcaagcccggtgcctga

SEQ ID NO: 9086 - DNA, 1827 bp, synthetic construct
  source 1..1827: mol_type = other DNA
atggccttaccagtgaccgccttgctcctgccgctggccttgctgctccacgccgccaggccgttcgaacaggttcagctgcaagagtctggcggaggacttgctcaagctggcggaagcctgagactgtcttgtgccgcctctggcagaaccttcagcatgggctggtttagacaggcccctggcaaagagagagagttcgtcgccgccatcacatacagcggcgccagcccttactacgcctcttctgtcagaggccggttcaccatcagccgggacaacgccaagaacaccgtgtacctccagatgaacagcctgaagccagaggacaccgccgtgtactactgtgccgccaatccaacctacggcagcgactggaatgccgagaattggggccagggcacccaagtgacagtgtctagtacgcgtggaggcagtggtgtcttcacactcgaagatttcgttggggactggcgacagacagccggctacaacctggaccaagtccttgaacagggaggtgtgtccagtttgtttcagaatctcggggtgtccgtaactccgatccaaaggattgtcctgagcggtgaaaatgggctgaagatcgacatccatgtcatcatcccgtatgaaggtctgagcggcgaccaaatgggccagatcgaaaaaatttttaaggtggtgtaccctgtggatgatcatcactttaaggtgatcctgcactatggcacactggtaatcgacggggttacgccgaacatgatcgactatttcggacggccctatgaaggcatcgccgtgttcgacggcaaaaagatcactgtaacagggaccctgtggaacggcaacaaaattatcgacgagcgcctgatcaaccccgacggctccctgctgttccgagtaaccatcaacggagtgaccggctggcggctgtgcgaacgcattctggcgctcgagggaggcagctggagccaccctcagtttgaaaaagactacaaagacgatgacgataagggatcagattacaaggatgatgatgacaaggggtcagattataaagacgacgatgataaagggagcgactacaaggacgacgatgacaaggcctggtcccatccccagttcgagaaacaccatcaccaccaccatcatcacactagtggctccggcgagggcagaggaagtctactaacctgcggagatgtggaagaaaatcctggcccacatatgaccgagtacaagcccacggtgcgcctcgccacccgcgacgacgtccccagggccgtacgcaccctcgccgccgcgttcgccgactaccccgccacgcgccacaccgtcgatccggaccgccacatcgagcgggtcaccgagctgcaagaactcttcctcacgcgcgtcgggctcgacatcggcaaggtgtgggtcgcggacgacggcgccgcggtggcggtctggaccacgccggagagcgtcgaagcgggggcggtgttcgccgagatcggcccgcgcatggccgagttgagcggttcccggctggccgcgcagcaacagatggaaggcctcctggcgccgcaccggcccaaggagcccgcgtggttcctggccaccgtcggcgtctcgcccgaccaccagggcaagggtctgggcagcgccgtcgtgctccccggagtggaggcggccgagcgcgccggggtgcccgccttcctggagacctccgcgccccgcaacctccccttctacgagcggctcggcttcaccgtcaccgccgacgtcgaggtgcccgaaggaccgcgcacctggtgcatgacccgcaagcccggtgcctga

SEQ ID NO: 9087 - DNA, 1833 bp, synthetic construct
  source 1..1833: mol_type = other DNA
atggccttaccagtgaccgccttgctcctgccgctggccttgctgctccacgccgccaggccggaggtgcagctggttgaatctggcggaggactggttcagcctggcggatctctgagactgtcttgtgccgccagcgagttcacctacagcatgggctggtttagacaggcccctggcaaaggactggaaggcgtgtcccacatctacaccagaggcggcactaccgtgtacgccgattctgtgcggggcagattcgtgctgagccgggacaacagcaagaacaccctgtacctgcagatgaacagcctgagagccgaggacaccgccgtgtactattgtgccgctcggaccatctttgaaggcagctggtctagccccagcagcttcgatttttggggccagggcacactggtcaccgtttctagcacgcgtggaggcagtggtgtcttcacactcgaagatttcgttggggactggcgacagacagccggctacaacctggaccaagtccttgaacagggaggtgtgtccagtttgtttcagaatctcggggtgtccgtaactccgatccaaaggattgtcctgagcggtgaaaatgggctgaagatcgacatccatgtcatcatcccgtatgaaggtctgagcggcgaccaaatgggccagatcgaaaaaatttttaaggtggtgtaccctgtggatgatcatcactttaaggtgatcctgcactatggcacactggtaatcgacggggttacgccgaacatgatcgactatttcggacggccctatgaaggcatcgccgtgttcgacggcaaaaagatcactgtaacagggaccctgtggaacggcaacaaaattatcgacgagcgcctgatcaaccccgacggctccctgctgttccgagtaaccatcaacggagtgaccggctggcggctgtgcgaacgcattctggcgctcgagggaggcagctggagccaccctcagtttgaaaaagactacaaagacgatgacgataagggatcagattacaaggatgatgatgacaaggggtcagattataaagacgacgatgataaagggagcgactacaaggacgacgatgacaaggcctggtcccatccccagttcgagaaacaccatcaccaccaccatcatcacactagtggctccggcgagggcagaggaagtctactaacctgcggagatgtggaagaaaatcctggcccacatatgaccgagtacaagcccacggtgcgcctcgccacccgcgacgacgtccccagggccgtacgcaccctcgccgccgcgttcgccgactaccccgccacgcgccacaccgtcgatccggaccgccacatcgagcgggtcaccgagctgcaagaactcttcctcacgcgcgtcgggctcgacatcggcaaggtgtgggtcgcggacgacggcgccgcggtggcggtctggaccacgccggagagcgtcgaagcgggggcggtgttcgccgagatcggcccgcgcatggccgagttgagcggttcccggctggccgcgcagcaacagatggaaggcctcctggcgccgcaccggcccaaggagcccgcgtggttcctggccaccgtcggcgtctcgcccgaccaccagggcaagggtctgggcagcgccgtcgtgctccccggagtggaggcggccgagcgcgccggggtgcccgccttcctggagacctccgcgccccgcaacctccccttctacgagcggctcggcttcaccgtcaccgccgacgtcgaggtgcccgaaggaccgcgcacctggtgcatgacccgcaagcccggtgcctga

SEQ ID NO: 9088 - DNA, 1851 bp, synthetic construct; identical to SEQ ID NO: 9001
  source 1..1851: mol_type = other DNA

SEQ ID NO: 9089 - DNA, 1851 bp, synthetic construct; identical to SEQ ID NO: 9001
  source 1..1851: mol_type = other DNA

SEQ ID NO: 9090 - DNA, 1851 bp, synthetic construct
  source 1..1851: mol_type = other DNA
atggccctgcctgtgacagctctgctgctgcctctggcactgctgctgcacgccgccagacctcaagttcagctggtggaaagcggtggtggcgttgtgcaacctggtggaagtctgaggctgagctgtgccgcttctggcctgagctttagcacctacactgtggcctggttcaggcaggctcccggaaagggtcttgaaggcgtggccgccattccttacaccagccagcacatggtgtacacagacagcgtcagaggccggttcaccatcagcagagacaactccaagaatacgctctatctccagatgaactctctgcgcgccgaagatacagccgtgtattactgcgccaccgacagacggcctggcacctctatgctggctgtgaacggctacaaccactggggacagggaaccaccgtgaccgtgtcatctggtaccgaaacgcgtggaggcagtggtgtcttcacactcgaagatttcgttggggactggcgacagacagccggctacaacctggaccaagtccttgaacagggaggtgtgtccagtttgtttcagaatctcggggtgtccgtaactccgatccaaaggattgtcctgagcggtgaaaatgggctgaagatcgacatccatgtcatcatcccgtatgaaggtctgagcggcgaccaaatgggccagatcgaaaaaatttttaaggtggtgtaccctgtggatgatcatcactttaaggtgatcctgcactatggcacactggtaatcgacggggttacgccgaacatgatcgactatttcggacggccctatgaaggcatcgccgtgttcgacggcaaaaagatcactgtaacagggaccctgtggaacggcaacaaaattatcgacgagcgcctgatcaaccccgacggctccctgctgttccgagtaaccatcaacggagtgaccggctggcggctgtgcgaacgcattctggcgctcgagggaggcagctggagccaccctcagtttgaaaaagactacaaagacgatgacgataagggatcagattacaaggatgatgatgacaaggggtcagattataaagacgacgatgataaagggagcgactacaaggacgacgatgacaaggcctggtcccatccccagttcgagaaacaccatcaccaccaccatcatcacactagtggctccggcgagggcagaggaagtctactaacctgcggagatgtggaagaaaatcctggcccacatatgaccgagtacaagcccacggtgcgcctcgccacccgcgacgacgtccccagggccgtacgcaccctcgccgccgcgttcgccgactaccccgccacgcgccacaccgtcgatccggaccgccacatcgagcgggtcaccgagctgcaagaactcttcctcacgcgcgtcgggctcgacatcggcaaggtgtgggtcgcggacgacggcgccgcggtggcggtctggaccacgccggagagcgtcgaagcgggggcggtgttcgccgagatcggcccgcgcatggccgagttgagcggttcccggctggccgcgcagcaacagatggaaggcctcctggcgccgcaccggcccaaggagcccgcgtggttcctggccaccgtcggcgtctcgcccgaccaccagggcaagggtctgggcagcgccgtcgtgctccccggagtggaggcggccgagcgcgccggggtgcccgccttcctggagacctccgcgccccgcaacctccccttctacgagcggctcggcttcaccgtcaccgccgacgtcgaggtgcccgaaggaccgcgcacctggtgcatgacccgcaagcccggtgcctga

SEQ ID NO: 9091 - DNA, 1851 bp, synthetic construct
  source 1..1851: mol_type = other DNA
atggccctgcctgtgacagctctgctgctgcctctggcactgctgctgcacgccgccagacctcaagttcagctggtggaaagcggtggtggcgttgtgcaacctggtggaagtctgaggctgagctgtgccgcttctggcctgagctttagcacctacactgtggcctggttcaggcaggctcccggaaagggtcttgaaggcgtggccgccattccttacaccagccagcacatggtgtacgccgacagcgtcaagggccggttcaccatcagcagagacaactccaagaatacgctctatctccagatgaactctctgcgcgccgaagatacagccgtgtattactgcgccaccgacagacggcctggcacctctatgctggctgtgaacggctacaaccactggggacagggaaccaccgtgaccgtgtcatctggtaccgaaacgcgtggaggcagtggtgtcttcacactcgaagatttcgttggggactggcgacagacagccggctacaacctggaccaagtccttgaacagggaggtgtgtccagtttgtttcagaatctcggggtgtccgtaactccgatccaaaggattgtcctgagcggtgaaaatgggctgaagatcgacatccatgtcatcatcccgtatgaaggtctgagcggcgaccaaatgggccagatcgaaaaaatttttaaggtggtgtaccctgtggatgatcatcactttaaggtgatcctgcactatggcacactggtaatcgacggggttacgccgaacatgatcgactatttcggacggccctatgaaggcatcgccgtgttcgacggcaaaaagatcactgtaacagggaccctgtggaacggcaacaaaattatcgacgagcgcctgatcaaccccgacggctccctgctgttccgagtaaccatcaacggagtgaccggctggcggctgtgcgaacgcattctggcgctcgagggaggcagctggagccaccctcagtttgaaaaagactacaaagacgatgacgataagggatcagattacaaggatgatgatgacaaggggtcagattataaagacgacgatgataaagggagcgactacaaggacgacgatgacaaggcctggtcccatccccagttcgagaaacaccatcaccaccaccatcatcacactagtggctccggcgagggcagaggaagtctactaacctgcggagatgtggaagaaaatcctggcccacatatgaccgagtacaagcccacggtgcgcctcgccacccgcgacgacgtccccagggccgtacgcaccctcgccgccgcgttcgccgactaccccgccacgcgccacaccgtcgatccggaccgccacatcgagcgggtcaccgagctgcaagaactcttcctcacgcgcgtcgggctcgacatcggcaaggtgtgggtcgcggacgacggcgccgcggtggcggtctggaccacgccggagagcgtcgaagcgggggcggtgttcgccgagatcggcccgcgcatggccgagttgagcggttcccggctggccgcgcagcaacagatggaaggcctcctggcgccgcaccggcccaaggagcccgcgtggttcctggccaccgtcggcgtctcgcccgaccaccagggcaagggtctgggcagcgccgtcgtgctccccggagtggaggcggccgagcgcgccggggtgcccgccttcctggagacctccgcgccccgcaacctccccttctacgagcggctcggcttcaccgtcaccgccgacgtcgaggtgcccgaaggaccgcgcacctggtgcatgacccgcaagcccggtgcctga

SEQ ID NO: 9092 - DNA, 1851 bp, synthetic construct
  source 1..1851: mol_type = other DNA
atggccctgcctgtgacagctctgctgctgcctctggcactgctgctgcacgccgccagacctcaagttcagctggtggaaagcggtggtggcgttgtgcaacctggtggaagtctgaggctgagctgtgccgcttctggcctgagctttagcacctacactgtggcctggttcaggcaggctcccggaaagggtcttgaaggcgtggccgccattccttacaccagccagcacatggtgtacgccgacagcgtcaagggccggttcaccatcagcagagacaactccaagaatacgctctatctccagatgaactctctgcgcgccgaagatacagccgtgtattactgcgccaccgacagacggcctggcaccaccatgctggctgtgaacggctacaaccactggggacagggaaccaccgtgaccgtgtcatctggtaccgaaacgcgtggaggcagtggtgtcttcacactcgaagatttcgttggggactggcgacagacagccggctacaacctggaccaagtccttgaacagggaggtgtgtccagtttgtttcagaatctcggggtgtccgtaactccgatccaaaggattgtcctgagcggtgaaaatgggctgaagatcgacatccatgtcatcatcccgtatgaaggtctgagcggcgaccaaatgggccagatcgaaaaaatttttaaggtggtgtaccctgtggatgatcatcactttaaggtgatcctgcactatggcacactggtaatcgacggggttacgccgaacatgatcgactatttcggacggccctatgaaggcatcgccgtgttcgacggcaaaaagatcactgtaacagggaccctgtggaacggcaacaaaattatcgacgagcgcctgatcaaccccgacggctccctgctgttccgagtaaccatcaacggagtgaccggctggcggctgtgcgaacgcattctggcgctcgagggaggcagctggagccaccctcagtttgaaaaagactacaaagacgatgacgataagggatcagattacaaggatgatgatgacaaggggtcagattataaagacgacgatgataaagggagcgactacaaggacgacgatgacaaggcctggtcccatccccagttcgagaaacaccatcaccaccaccatcatcacactagtggctccggcgagggcagaggaagtctactaacctgcggagatgtggaagaaaatcctggcccacatatgaccgagtacaagcccacggtgcgcctcgccacccgcgacgacgtccccagggccgtacgcaccctcgccgccgcgttcgccgactaccccgccacgcgccacaccgtcgatccggaccgccacatcgagcgggtcaccgagctgcaagaactcttcctcacgcgcgtcgggctcgacatcggcaaggtgtgggtcgcggacgacggcgccgcggtggcggtctggaccacgccggagagcgtcgaagcgggggcggtgttcgccgagatcggcccgcgcatggccgagttgagcggttcccggctggccgcgcagcaacagatggaaggcctcctggcgccgcaccggcccaaggagcccgcgtggttcctggccaccgtcggcgtctcgcccgaccaccagggcaagggtctgggcagcgccgtcgtgctccccggagtggaggcggccgagcgcgccggggtgcccgccttcctggagacctccgcgccccgcaacctccccttctacgagcggctcggcttcaccgtcaccgccgacgtcgaggtgcccgaaggaccgcgcacctggtgcatgacccgcaagcccggtgcctga

SEQ ID NO: 9093 - DNA, 1851 bp, synthetic construct
  source 1..1851: mol_type = other DNA
atggccctgcctgtgacagctctgctgctgcctctggcactgctgctgcacgccgccagacctcaagttcagctggtggaaagcggtggtggcgttgtgcaacctggtaggagtctgaggctgagctgtgccgcttctggcctgagctttagcacctacactgtggcctggttcaggcaggctcccggaaagggtcttgaaggcgtggccgccattccttacaccagccagcacatggtgtacgccgacagcgtcaagggccggttcaccatcagcagagacaactccaagaatacgctctatctccagatgaactctctgcgcgccgaagatacagccgtgtattactgcgccaccgacagacggcctggcaccaccatgctggctgtgaacggctacaaccactggggacagggaaccctggtgaccgtgtcatctggtaccgaaacgcgtggaggcagtggtgtcttcacactcgaagatttcgttggggactggcgacagacagccggctacaacctggaccaagtccttgaacagggaggtgtgtccagtttgtttcagaatctcggggtgtccgtaactccgatccaaaggattgtcctgagcggtgaaaatgggctgaagatcgacatccatgtcatcatcccgtatgaaggtctgagcggcgaccaaatgggccagatcgaaaaaatttttaaggtggtgtaccctgtggatgatcatcactttaaggtgatcctgcactatggcacactggtaatcgacggggttacgccgaacatgatcgactatttcggacggccctatgaaggcatcgccgtgttcgacggcaaaaagatcactgtaacagggaccctgtggaacggcaacaaaattatcgacgagcgcctgatcaaccccgacggctccctgctgttccgagtaaccatcaacggagtgaccggctggcggctgtgcgaacgcattctggcgctcgagggaggcagctggagccaccctcagtttgaaaaagactacaaagacgatgacgataagggatcagattacaaggatgatgatgacaaggggtcagattataaagacgacgatgataaagggagcgactacaaggacgacgatgacaaggcctggtcccatccccagttcgagaaacaccatcaccaccaccatcatcacactagtggctccggcgagggcagaggaagtctactaacctgcggagatgtggaagaaaatcctggcccacatatgaccgagtacaagcccacggtgcgcctcgccacccgcgacgacgtccccagggccgtacgcaccctcgccgccgcgttcgccgactaccccgccacgcgccacaccgtcgatccggaccgccacatcgagcgggtcaccgagctgcaagaactcttcctcacgcgcgtcgggctcgacatcggcaaggtgtgggtcgcggacgacggcgccgcggtggcggtctggaccacgccggagagcgtcgaagcgggggcggtgttcgccgagatcggcccgcgcatggccgagttgagcggttcccggctggccgcgcagcaacagatggaaggcctcctggcgccgcaccggcccaaggagcccgcgtggttcctggccaccgtcggcgtctcgcccgaccaccagggcaagggtctgggcagcgccgtcgtgctccccggagtggaggcggccgagcgcgccggggtgcccgccttcctggagacctccgcgccccgcaacctccccttctacgagcggctcggcttcaccgtcaccgccgacgtcgaggtgcccgaaggaccgcgcacctggtgcatgacccgcaagcccggtgcctga

SEQ ID NO: 9094 - DNA, 1854 bp, synthetic construct
  source 1..1854: mol_type = other DNA
atggccttaccagtgaccgccttgctcctgccgctggccttgctgctccacgccgccaggccggcatgccaggtgcagctggttgaatctggtggcggagttgttcagcctggcggctctctgagactgtcttgtgccgccagctttagcggctacggcgtgtcaacaatggcctggtttagacaggcccctggcaaaggactggaaggcgtggccgctatcacagtcggcagcggcaatacctactacgccgactctgtgaagggcagattcaccatcagccgggacaacagcaagaacaccgtgtacctccagatgaacagcctgagagccgaggacaccgccatgtactattgtgccgttggctggctgagcggcggatcttggcatgtgcctggcagatacaactactggggccagggcacactggtcacagtttctagcggtaccacgcgtggaggcagtggtgtcttcacactcgaagatttcgttggggactggcgacagacagccggctacaacctggaccaagtccttgaacagggaggtgtgtccagtttgtttcagaatctcggggtgtccgtaactccgatccaaaggattgtcctgagcggtgaaaatgggctgaagatcgacatccatgtcatcatcccgtatgaaggtctgagcggcgaccaaatgggccagatcgaaaaaatttttaaggtggtgtaccctgtggatgatcatcactttaaggtgatcctgcactatggcacactggtaatcgacggggttacgccgaacatgatcgactatttcggacggccctatgaaggcatcgccgtgttcgacggcaaaaagatcactgtaacagggaccctgtggaacggcaacaaaattatcgacgagcgcctgatcaaccccgacggctccctgctgttccgagtaaccatcaacggagtgaccggctggcggctgtgcgaacgcattctggcgctcgagggaggcagctggagccaccctcagtttgaaaaagactacaaagacgatgacgataagggatcagattacaaggatgatgatgacaaggggtcagattataaagacgacgatgataaagggagcgactacaaggacgacgatgacaaggcctggtcccatccccagttcgagaaacaccatcaccaccaccatcatcacactagtggctccggcgagggcagaggaagtctactaacctgcggagatgtggaagaaaatcctggcccacatatgaccgagtacaagcccacggtgcgcctcgccacccgcgacgacgtccccagggccgtacgcaccctcgccgccgcgttcgccgactaccccgccacgcgccacaccgtcgatccggaccgccacatcgagcgggtcaccgagctgcaagaactcttcctcacgcgcgtcgggctcgacatcggcaaggtgtgggtcgcggacgacggcgccgcggtggcggtctggaccacgccggagagcgtcgaagcgggggcggtgttcgccgagatcggcccgcgcatggccgagttgagcggttcccggctggccgcgcagcaacagatggaaggcctcctggcgccgcaccggcccaaggagcccgcgtggttcctggccaccgtcggcgtctcgcccgaccaccagggcaagggtctgggcagcgccgtcgtgctccccggagtggaggcggccgagcgcgccggggtgcccgccttcctggagacctccgcgccccgcaacctccccttctacgagcggctcggcttcaccgtcaccgccgacgtcgaggtgcccgaaggaccgcgcacctggtgcatgacccgcaagcccggtgcctga

SEQ ID NO: 9095 - DNA, 1842 bp, synthetic construct
  source 1..1842: mol_type = other DNA
atggccttaccagtgaccgccttgctcctgccgctggccttgctgctccacgccgccaggccgcaggtgcagctggttgaatctggtggcggagttgttcagcctggcggctctctgagactgtcttgtgccgccagctttagcggctacggcgtgtcaacaatggcctggtttagacaggcccctggcaaaggactggaaggcgtggccgtgatcacagtcggcagcggcaatacctactacaccgactctgtgagaggcagattcaccatcagccgggacaacagcaagaacaccgtgtacctccagatgaacagcctgagagccgaggacaccgccatgtactattgtgccgttggctggctgagcggcggatcttggcatgtgcctggcagatacaactactggggccagggcacactggtcacagtttctagcacgcgtggaggcagtggtgtcttcacactcgaagatttcgttggggactggcgacagacagccggctacaacctggaccaagtccttgaacagggaggtgtgtccagtttgtttcagaatctcggggtgtccgtaactccgatccaaaggattgtcctgagcggtgaaaatgggctgaagatcgacatccatgtcatcatcccgtatgaaggtctgagcggcgaccaaatgggccagatcgaaaaaatttttaaggtggtgtaccctgtggatgatcatcactttaaggtgatcctgcactatggcacactggtaatcgacggggttacgccgaacatgatcgactatttcggacggccctatgaaggcatcgccgtgttcgacggcaaaaagatcactgtaacagggaccctgtggaacggcaacaaaattatcgacgagcgcctgatcaaccccgacggctccctgctgttccgagtaaccatcaacggagtgaccggctggcggctgtgcgaacgcattctggcgctcgagggaggcagctggagccaccctcagtttgaaaaagactacaaagacgatgacgataagggatcagattacaaggatgatgatgacaaggggtcagattataaagacgacgatgataaagggagcgactacaaggacgacgatgacaaggcctggtcccatccccagttcgagaaacaccatcaccaccaccatcatcacactagtggctccggcgagggcagaggaagtctactaacctgcggagatgtggaagaaaatcctggcccacatatgaccgagtacaagcccacggtgcgcctcgccacccgcgacgacgtccccagggccgtacgcaccctcgccgccgcgttcgccgactaccccgccacgcgccacaccgtcgatccggaccgccacatcgagcgggtcaccgagctgcaagaactcttcctcacgcgcgtcgggctcgacatcggcaaggtgtgggtcgcggacgacggcgccgcggtggcggtctggaccacgccggagagcgtcgaagcgggggcggtgttcgccgagatcggcccgcgcatggccgagttgagcggttcccggctggccgcgcagcaacagatggaaggcctcctggcgccgcaccggcccaaggagcccgcgtggttcctggccaccgtcggcgtctcgcccgaccaccagggcaagggtctgggcagcgccgtcgtgctccccggagtggaggcggccgagcgcgccggggtgcccgccttcctggagacctccgcgccccgcaacctccccttctacgagcggctcggcttcaccgtcaccgccgacgtcgaggtgcccgaaggaccgcgcacctggtgcatgacccgcaagcccggtgcctga

SEQ ID NO: 9096 - DNA, 1842 bp, synthetic construct
  source 1..1842: mol_type = other DNA
atggccttaccagtgaccgccttgctcctgccgctggccttgctgctccacgccgccaggccgcaagttcagctggtggaaagcggtggtggcgttgtgcaacctggtagaagtctgaggcttagctgcgccgccagcttttctggatacggcgtgtcaacaatgggatggtttaggcaggctccaggcaagggccttgaaggcgtggccgctatcacagtcggctccggcaatacctactacgccgatagcgtgagaggcaggttcacaatctccagagacaacagcaagaatacggtgtacctgcaaatgaacagcctccgcgccgaggatacagccatgtattactgtgccgtgggctacctgtctggcggctcttgggatgtgcccggcagatacaattactggggacagggaaccctggttaccgtgtctagtacgcgtggaggcagtggtgtcttcacactcgaagatttcgttggggactggcgacagacagccggctacaacctggaccaagtccttgaacagggaggtgtgtccagtttgtttcagaatctcggggtgtccgtaactccgatccaaaggattgtcctgagcggtgaaaatgggctgaagatcgacatccatgtcatcatcccgtatgaaggtctgagcggcgaccaaatgggccagatcgaaaaaatttttaaggtggtgtaccctgtggatgatcatcactttaaggtgatcctgcactatggcacactggtaatcgacggggttacgccgaacatgatcgactatttcggacggccctatgaaggcatcgccgtgttcgacggcaaaaagatcactgtaacagggaccctgtggaacggcaacaaaattatcgacgagcgcctgatcaaccccgacggctccctgctgttccgagtaaccatcaacggagtgaccggctggcggctgtgcgaacgcattctggcgctcgagggaggcagctggagccaccctcagtttgaaaaagactacaaagacgatgacgataagggatcagattacaaggatgatgatgacaaggggtcagattataaagacgacgatgataaagggagcgactacaaggacgacgatgacaaggcctggtcccatccccagttcgagaaacaccatcaccaccaccatcatcacactagtggctccggcgagggcagaggaagtctactaacctgcggagatgtggaagaaaatcctggcccacatatgaccgagtacaagcccacggtgcgcctcgccacccgcgacgacgtccccagggccgtacgcaccctcgccgccgcgttcgccgactaccccgccacgcgccacaccgtcgatccggaccgccacatcgagcgggtcaccgagctgcaagaactcttcctcacgcgcgtcgggctcgacatcggcaaggtgtgggtcgcggacgacggcgccgcggtggcggtctggaccacgccggagagcgtcgaagcgggggcggtgttcgccgagatcggcccgcgcatggccgagttgagcggttcccggctggccgcgcagcaacagatggaaggcctcctggcgccgcaccggcccaaggagcccgcgtggttcctggccaccgtcggcgtctcgcccgaccaccagggcaagggtctgggcagcgccgtcgtgctccccggagtggaggcggccgagcgcgccggggtgcccgccttcctggagacctccgcgccccgcaacctccccttctacgagcggctcggcttcaccgtcaccgccgacgtcgaggtgcccgaaggaccgcgcacctggtgcatgacccgcaagcccggtgcctga

SEQ ID NO: 9097 - DNA, 1842 bp, synthetic construct
  source 1..1842: mol_type = other DNA
atggccttaccagtgaccgccttgctcctgccgctggccttgctgctccacgccgccaggccgcaggtgcagctggttgaatctggtggcggagttgttcagcctggcagatctctgagactgtcttgtgccgccagctttagcggctacggcgtgtcaacaatggcctggtttagacaggcccctggcaaaggactggaaggcgtggccgtgatcacagtcggcagcggcaatacctactacaccgactctgtgagaggcagattcaccatcagccgggacaacagcaagaacaccgtgtacctccagatgaacagcctgagagccgaggacaccgccatgtactattgtgccgttggctggctgagcggcggatcttggcatgtgcctggcagatacaactactggggccagggcacactggtcacagtttctagcacgcgtggaggcagtggtgtcttcacactcgaagatttcgttggggactggcgacagacagccggctacaacctggaccaagtccttgaacagggaggtgtgtccagtttgtttcagaatctcggggtgtccgtaactccgatccaaaggattgtcctgagcggtgaaaatgggctgaagatcgacatccatgtcatcatcccgtatgaaggtctgagcggcgaccaaatgggccagatcgaaaaaatttttaaggtggtgtaccctgtggatgatcatcactttaaggtgatcctgcactatggcacactggtaatcgacggggttacgccgaacatgatcgactatttcggacggccctatgaaggcatcgccgtgttcgacggcaaaaagatcactgtaacagggaccctgtggaacggcaacaaaattatcgacgagcgcctgatcaaccccgacggctccctgctgttccgagtaaccatcaacggagtgaccggctggcggctgtgcgaacgcattctggcgctcgagggaggcagctggagccaccctcagtttgaaaaagactacaaagacgatgacgataagggatcagattacaaggatgatgatgacaaggggtcagattataaagacgacgatgataaagggagcgactacaaggacgacgatgacaaggcctggtcccatccccagttcgagaaacaccatcaccaccaccatcatcacactagtggctccggcgagggcagaggaagtctactaacctgcggagatgtggaagaaaatcctggcccacatatgaccgagtacaagcccacggtgcgcctcgccacccgcgacgacgtccccagggccgtacgcaccctcgccgccgcgttcgccgactaccccgccacgcgccacaccgtcgatccggaccgccacatcgagcgggtcaccgagctgcaagaactcttcctcacgcgcgtcgggctcgacatcggcaaggtgtgggtcgcggacgacggcgccgcggtggcggtctggaccacgccggagagcgtcgaagcgggggcggtgttcgccgagatcggcccgcgcatggccgagttgagcggttcccggctggccgcgcagcaacagatggaaggcctcctggcgccgcaccggcccaaggagcccgcgtggttcctggccaccgtcggcgtctcgcccgaccaccagggcaagggtctgggcagcgccgtcgtgctccccggagtggaggcggccgagcgcgccggggtgcccgccttcctggagacctccgcgccccgcaacctccccttctacgagcggctcggcttcaccgtcaccgccgacgtcgaggtgcccgaaggaccgcgcacctggtgcatgacccgcaagcccggtgcctga

SEQ ID NO: 9098 - DNA, 1842 bp, synthetic construct
  source 1..1842: mol_type = other DNA
atggccttaccagtgaccgccttgctcctgccgctggccttgctgctccacgccgccaggccgcaagttcagctggtggaaagcggtggtggcgttgtgcaacctggtagaagtctgaggcttagctgcgccgccagcttttctggatacggcgtgtcaacaatgggatggtttaggcaggctccaggcaagggccttgaaggcgtggccgtgatcacagtcggctccggcaatacctactacgccgatagcgtgagaggcaggttcacaatctccagagacaacagcaagaatacggtgtacctgcaaatgaacagcctccgcgccgaggatacagccatgtattactgtgccgtgggctacctgtctggcggctcttgggatgtgcccggcagatacaattactggggacagggaaccctggttaccgtgtctagtacgcgtggaggcagtggtgtcttcacactcgaagatttcgttggggactggcgacagacagccggctacaacctggaccaagtccttgaacagggaggtgtgtccagtttgtttcagaatctcggggtgtccgtaactccgatccaaaggattgtcctgagcggtgaaaatgggctgaagatcgacatccatgtcatcatcccgtatgaaggtctgagcggcgaccaaatgggccagatcgaaaaaatttttaaggtggtgtaccctgtggatgatcatcactttaaggtgatcctgcactatggcacactggtaatcgacggggttacgccgaacatgatcgactatttcggacggccctatgaaggcatcgccgtgttcgacggcaaaaagatcactgtaacagggaccctgtggaacggcaacaaaattatcgacgagcgcctgatcaaccccgacggctccctgctgttccgagtaaccatcaacggagtgaccggctggcggctgtgcgaacgcattctggcgctcgagggaggcagctggagccaccctcagtttgaaaaagactacaaagacgatgacgataagggatcagattacaaggatgatgatgacaaggggtcagattataaagacgacgatgataaagggagcgactacaaggacgacgatgacaaggcctggtcccatccccagttcgagaaacaccatcaccaccaccatcatcacactagtggctccggcgagggcagaggaagtctactaacctgcggagatgtggaagaaaatcctggcccacatatgaccgagtacaagcccacggtgcgcctcgccacccgcgacgacgtccccagggccgtacgcaccctcgccgccgcgttcgccgactaccccgccacgcgccacaccgtcgatccggaccgccacatcgagcgggtcaccgagctgcaagaactcttcctcacgcgcgtcgggctcgacatcggcaaggtgtgggtcgcggacgacggcgccgcggtggcggtctggaccacgccggagagcgtcgaagcgggggcggtgttcgccgagatcggcccgcgcatggccgagttgagcggttcccggctggccgcgcagcaacagatggaaggcctcctggcgccgcaccggcccaaggagcccgcgtggttcctggccaccgtcggcgtctcgcccgaccaccagggcaagggtctgggcagcgccgtcgtgctccccggagtggaggcggccgagcgcgccggggtgcccgccttcctggagacctccgcgccccgcaacctccccttctacgagcggctcggcttcaccgtcaccgccgacgtcgaggtgcccgaaggaccgcgcacctggtgcatgacccgcaagcccggtgcctga

SEQ ID NO: 9099 - DNA, 1842 bp, synthetic construct
  source 1..1842: mol_type = other DNA
atggccttaccagtgaccgccttgctcctgccgctggccttgctgctccacgccgccaggccgcaagttcagctggtggaaagcggtggtggcgttgtgcaacctggtagaagtctgaggcttagctgcgccgccagcttttctggatacggcgtgtcaacaatgggatggtttaggcaggctccaggcaagggccttgaaggcgtggccgtgatcacagtcggctccggcaatacctactacaccgatagcgtgagaggcaggttcacaatctccagagacaacagcaagaatacggtgtacctgcaaatgaacagcctccgcgccgaggatacagccatgtattactgtgccgtgggctacctgtctggcggctcttgggatgtgcccggcagatacaattactggggacagggaaccctggttaccgtgtctagtacgcgtggaggcagtggtgtcttcacactcgaagatttcgttggggactggcgacagacagccggctacaacctggaccaagtccttgaacagggaggtgtgtccagtttgtttcagaatctcggggtgtccgtaactccgatccaaaggattgtcctgagcggtgaaaatgggctgaagatcgacatccatgtcatcatcccgtatgaaggtctgagcggcgaccaaatgggccagatcgaaaaaatttttaaggtggtgtaccctgtggatgatcatcactttaaggtgatcctgcactatggcacactggtaatcgacggggttacgccgaacatgatcgactatttcggacggccctatgaaggcatcgccgtgttcgacggcaaaaagatcactgtaacagggaccctgtggaacggcaacaaaattatcgacgagcgcctgatcaaccccgacggctccctgctgttccgagtaaccatcaacggagtgaccggctggcggctgtgcgaacgcattctggcgctcgagggaggcagctggagccaccctcagtttgaaaaagactacaaagacgatgacgataagggatcagattacaaggatgatgatgacaaggggtcagattataaagacgacgatgataaagggagcgactacaaggacgacgatgacaaggcctggtcccatccccagttcgagaaacaccatcaccaccaccatcatcacactagtggctccggcgagggcagaggaagtctactaacctgcggagatgtggaagaaaatcctggcccacatatgaccgagtacaagcccacggtgcgcctcgccacccgcgacgacgtccccagggccgtacgcaccctcgccgccgcgttcgccgactaccccgccacgcgccacaccgtcgatccggaccgccacatcgagcgggtcaccgagctgcaagaactcttcctcacgcgcgtcgggctcgacatcggcaaggtgtgggtcgcggacgacggcgccgcggtggcggtctggaccacgccggagagcgtcgaagcgggggcggtgttcgccgagatcggcccgcgcatggccgagttgagcggttcccggctggccgcgcagcaacagatggaaggcctcctggcgccgcaccggcccaaggagcccgcgtggttcctggccaccgtcggcgtctcgcccgaccaccagggcaagggtctgggcagcgccgtcgtgctccccggagtggaggcggccgagcgcgccggggtgcccgccttcctggagacctccgcgccccgcaacctccccttctacgagcggctcggcttcaccgtcaccgccgacgtcgaggtgcccgaaggaccgcgcacctggtgcatgacccgcaagcccggtgcctga

SEQ ID NO: 9100 - DNA, 1854 bp, synthetic construct
  source 1..1854: mol_type = other DNA
atggccttaccagtgaccgccttgctcctgccgctggccttgctgctccacgccgccaggccggcatgcgaggtgcagctggttgaatctggcggaggactggttcagcctggcggatctctgagactgtcttgtgccgccagcggcaacacctacagcaccaattacatggcctggttcagacaggcccctggcaaaggactggaagaggtggccgtgatctacaccagaggcggccacacctattacgtggactctgtgcggggcagattcaccatcagccaggacaacgccaagaacagcctgtacctccagatgaactccctgagagccgaggacaccgccgtgtactattgtgctgccagcagcaggcacagactgggcctgaacaaccccagagactacgactattggggccagggcacactggtcacagtttctagcggtaccacgcgtggaggcagtggtgtcttcacactcgaagatttcgttggggactggcgacagacagccggctacaacctggaccaagtccttgaacagggaggtgtgtccagtttgtttcagaatctcggggtgtccgtaactccgatccaaaggattgtcctgagcggtgaaaatgggctgaagatcgacatccatgtcatcatcccgtatgaaggtctgagcggcgaccaaatgggccagatcgaaaaaatttttaaggtggtgtaccctgtggatgatcatcactttaaggtgatcctgcactatggcacactggtaatcgacggggttacgccgaacatgatcgactatttcggacggccctatgaaggcatcgccgtgttcgacggcaaaaagatcactgtaacagggaccctgtggaacggcaacaaaattatcgacgagcgcctgatcaaccccgacggctccctgctgttccgagtaaccatcaacggagtgaccggctggcggctgtgcgaacgcattctggcgctcgagggaggcagctggagccaccctcagtttgaaaaagactacaaagacgatgacgataagggatcagattacaaggatgatgatgacaaggggtcagattataaagacgacgatgataaagggagcgactacaaggacgacgatgacaaggcctggtcccatccccagttcgagaaacaccatcaccaccaccatcatcacactagtggctccggcgagggcagaggaagtctactaacctgcggagatgtggaagaaaatcctggcccacatatgaccgagtacaagcccacggtgcgcctcgccacccgcgacgacgtccccagggccgtacgcaccctcgccgccgcgttcgccgactaccccgccacgcgccacaccgtcgatccggaccgccacatcgagcgggtcaccgagctgcaagaactcttcctcacgcgcgtcgggctcgacatcggcaaggtgtgggtcgcggacgacggcgccgcggtggcggtctggaccacgccggagagcgtcgaagcgggggcggtgttcgccgagatcggcccgcgcatggccgagttgagcggttcccggctggccgcgcagcaacagatggaaggcctcctggcgccgcaccggcccaaggagcccgcgtggttcctggccaccgtcggcgtctcgcccgaccaccagggcaagggtctgggcagcgccgtcgtgctccccggagtggaggcggccgagcgcgccggggtgcccgccttcctggagacctccgcgccccgcaacctccccttctacgagcggctcggcttcaccgtcaccgccgacgtcgaggtgcccgaaggaccgcgcacctggtgcatgacccgcaagcccggtgcctga

SEQ ID NO: 9101 - DNA, 1842 bp, synthetic construct
  source 1..1842: mol_type = other DNA
atggccttaccagtgaccgccttgctcctgccgctggccttgctgctccacgccgccaggccgcaggtgcagctggttgaatctggtggcggagttgttcagcctggcggctctctgagactgtcttgtgccgccagctttagcggctacggcgtgtcaacaatggcctggtttagacaggcccctggcaaaggactggaaggcgtggccgtgatcacagtcggcagcggcaatacctactacgccgactctgtgagaggcagattcaccatcagccgggacaacagcaagaacaccgtgtacctccagatgaacagcctgagagccgaggacaccgccatgtactattgtgccgttggctggctgagcggcggatcttggcatgtgcctggcagatacaactactggggccagggcacactggtcacagtttctagcacgcgtggaggcagtggtgtcttcacactcgaagatttcgttggggactggcgacagacagccggctacaacctggaccaagtccttgaacagggaggtgtgtccagtttgtttcagaatctcggggtgtccgtaactccgatccaaaggattgtcctgagcggtgaaaatgggctgaagatcgacatccatgtcatcatcccgtatgaaggtctgagcggcgaccaaatgggccagatcgaaaaaatttttaaggtggtgtaccctgtggatgatcatcactttaaggtgatcctgcactatggcacactggtaatcgacggggttacgccgaacatgatcgactatttcggacggccctatgaaggcatcgccgtgttcgacggcaaaaagatcactgtaacagggaccctgtggaacggcaacaaaattatcgacgagcgcctgatcaaccccgacggctccctgctgttccgagtaaccatcaacggagtgaccggctggcggctgtgcgaacgcattctggcgctcgagggaggcagctggagccaccctcagtttgaaaaagactacaaagacgatgacgataagggatcagattacaaggatgatgatgacaaggggtcagattataaagacgacgatgataaagggagcgactacaaggacgacgatgacaaggcctggtcccatccccagttcgagaaacaccatcaccaccaccatcatcacactagtggctccggcgagggcagaggaagtctactaacctgcggagatgtggaagaaaatcctggcccacatatgaccgagtacaagcccacggtgcgcctcgccacccgcgacgacgtccccagggccgtacgcaccctcgccgccgcgttcgccgactaccccgccacgcgccacaccgtcgatccggaccgccacatcgagcgggtcaccgagctgcaagaactcttcctcacgcgcgtcgggctcgacatcggcaaggtgtgggtcgcggacgacggcgccgcggtggcggtctggaccacgccggagagcgtcgaagcgggggcggtgttcgccgagatcggcccgcgcatggccgagttgagcggttcccggctggccgcgcagcaacagatggaaggcctcctggcgccgcaccggcccaaggagcccgcgtggttcctggccaccgtcggcgtctcgcccgaccaccagggcaagggtctgggcagcgccgtcgtgctccccggagtggaggcggccgagcgcgccggggtgcccgccttcctggagacctccgcgccccgcaacctccccttctacgagcggctcggcttcaccgtcaccgccgacgtcgaggtgcccgaaggaccgcgcacctggtgcatgacccgcaagcccggtgcctga

SEQ ID NO: 9102 - DNA, 1842 bp, synthetic construct
  source 1..1842: mol_type = other DNA
atggccttaccagtgaccgccttgctcctgccgctggccttgctgctccacgccgccaggccgcaagttcagctggtggaaagcggtggtggcgttgtgcaacctggtggaagtctgaggcttagctgcgccgccagcttttctggatacggcgtgtcaacaatggcatggtttaggcaggctccaggcaagggccttgaaggcgtggccgctatcacagtcggctccggcaatacctactacgccgatagcgtgaagggcaggttcacaatctccagagacaacagcaagaatacggtgtacctgcaaatgaacagcctccgcgccgaggatacagccatgtattactgtgccgtgggctacctgtctggcggctcttgggatgtgcccggcagatacaattactggggacagggaaccctggttaccgtgtctagtacgcgtggaggcagtggtgtcttcacactcgaagatttcgttggggactggcgacagacagccggctacaacctggaccaagtccttgaacagggaggtgtgtccagtttgtttcagaatctcggggtgtccgtaactccgatccaaaggattgtcctgagcggtgaaaatgggctgaagatcgacatccatgtcatcatcccgtatgaaggtctgagcggcgaccaaatgggccagatcgaaaaaatttttaaggtggtgtaccctgtggatgatcatcactttaaggtgatcctgcactatggcacactggtaatcgacggggttacgccgaacatgatcgactatttcggacggccctatgaaggcatcgccgtgttcgacggcaaaaagatcactgtaacagggaccctgtggaacggcaacaaaattatcgacgagcgcctgatcaaccccgacggctccctgctgttccgagtaaccatcaacggagtgaccggctggcggctgtgcgaacgcattctggcgctcgagggaggcagctggagccaccctcagtttgaaaaagactacaaagacgatgacgataagggatcagattacaaggatgatgatgacaaggggtcagattataaagacgacgatgataaagggagcgactacaaggacgacgatgacaaggcctggtcccatccccagttcgagaaacaccatcaccaccaccatcatcacactagtggctccggcgagggcagaggaagtctactaacctgcggagatgtggaagaaaatcctggcccacatatgaccgagtacaagcccacggtgcgcctcgccacccgcgacgacgtccccagggccgtacgcaccctcgccgccgcgttcgccgactaccccgccacgcgccacaccgtcgatccggaccgccacatcgagcgggtcaccgagctgcaagaactcttcctcacgcgcgtcgggctcgacatcggcaaggtgtgggtcgcggacgacggcgccgcggtggcggtctggaccacgccggagagcgtcgaagcgggggcggtgttcgccgagatcggcccgcgcatggccgagttgagcggttcccggctggccgcgcagcaacagatggaaggcctcctggcgccgcaccggcccaaggagcccgcgtggttcctggccaccgtcggcgtctcgcccgaccaccagggcaagggtctgggcagcgccgtcgtgctccccggagtggaggcggccgagcgcgccggggtgcccgccttcctggagacctccgcgccccgcaacctccccttctacgagcggctcggcttcaccgtcaccgccgacgtcgaggtgcccgaaggaccgcgcacctggtgcatgacccgcaagcccggtgcctga

SEQ ID NO: 9103 - DNA, 2190 bp, synthetic construct
  source 1..2190: mol_type = other DNA
atggccctgcctgtgacagctctgctgctgcctctggcactgctgctgcacgccgccagacctgacatcgtgatgacccagagccctgccaccctgtccgtgtctccaggcgaaagagccaccctgagctgcagagcttcccagagcgtgtccaacgacgtcgtgtggtatcagcagaagcccggccaggcccccagactgctgatctactacgccagcaacagatacaccggcatccccgccagattcagcggctctggcagcggcaccgagttcaccctgacaatcagcagcctccagagcgaggacttcgccgtgtactactgtcagcaggactacaccagcccctggaccttcggccagggcaccaagctggaaatcaagagaggcggaggcggaagtggaggcggaggatctggcggcggaggctctgaggtgcaactggtgcagagtggagccgaagtgaagaaacctggggccagcgtgcgggtgtcctgcaaggccagcggctacacctttaccaactacggcatgaactgggtgcgccaggctcctggacagggcctggaatggatgggctggatcaacacctacaccggcgagcccacctacgccgacgacttcaagggcagagtgaccatgaccaccgacaccagcacctccaccgcctacatggaactgcggagcctgagaagcgacgacaccgccgtgtattattgcgcccggatcggcgacagcagccccagcgattattggggccagggaaccctcgtgaccgtgtcctctacgcgtggaggcagtggtgtcttcacactcgaagatttcgttggggactggcgacagacagccggctacaacctggaccaagtccttgaacagggaggtgtgtccagtttgtttcagaatctcggggtgtccgtaactccgatccaaaggattgtcctgagcggtgaaaatgggctgaagatcgacatccatgtcatcatcccgtatgaaggtctgagcggcgaccaaatgggccagatcgaaaaaatttttaaggtggtgtaccctgtggatgatcatcactttaaggtgatcctgcactatggcacactggtaatcgacggggttacgccgaacatgatcgactatttcggacggccctatgaaggcatcgccgtgttcgacggcaaaaagatcactgtaacagggaccctgtggaacggcaacaaaattatcgacgagcgcctgatcaaccccgacggctccctgctgttccgagtaaccatcaacggagtgaccggctggcggctgtgcgaacgcattctggcgctcgagggaggcagctggagccaccctcagtttgaaaaagactacaaagacgatgacgataagggatcagattacaaggatgatgatgacaaggggtcagattataaagacgacgatgataaagggagcgactacaaggacgacgatgacaaggcctggtcccatccccagttcgagaaacaccatcaccaccaccatcatcacactagtggctccggcgagggcagaggaagtctactaacctgcggagatgtggaagaaaatcctggcccacatatgaccgagtacaagcccacggtgcgcctcgccacccgcgacgacgtccccagggccgtacgcaccctcgccgccgcgttcgccgactaccccgccacgcgccacaccgtcgatccggaccgccacatcgagcgggtcaccgagctgcaagaactcttcctcacgcgcgtcgggctcgacatcggcaaggtgtgggtcgcggacgacggcgccgcggtggcggtctggaccacgccggagagcgtcgaagcgggggcggtgttcgccgagatcggcccgcgcatggccgagttgagcggttcccggctggccgcgcagcaacagatggaaggcctcctggcgccgcaccggcccaaggagcccgcgtggttcctggccaccgtcggcgtctcgcccgaccaccagggcaagggtctgggcagcgccgtcgtgctccccggagtggaggcggccgagcgcgccggggtgcccgccttcctggagacctccgcgccccgcaacctccccttctacgagcggctcggcttcaccgtcaccgccgacgtcgaggtgcccgaaggaccgcgcacctggtgcatgacccgcaagcccggtgcctga

SEQ ID NO: 9104 - DNA, 2193 bp, synthetic construct
  source 1..2193: mol_type = other DNA
atggccttaccagtgaccgccttgctcctgccgctggccttgctgctccacgccgccaggccggagatcgtgctgacacagagccctggcaccctgagcctgtctccaggcgaaagagccacactgagctgtcgggcctctcagagcgtgggaggctacctggcttggtatcagcagaagccaggccaggcccccagactgctgatctacgacgccagcaatcgggccacaggcatccccgccagattttctggcagcggctccggcaccgacttcaccctgacaatcagcagcctggaacccgaggacttcgccgtgtactactgccagcagcggaacaactggccccccatgtacacattcggccagggcaccaagctggaaatcaagagaggcggaggcggaagtggaggcggaggatctggcggcggaggctctcaggtgcaactggtgcagagcggagccgaagtgaagaaacccggcagcagcgtgaaggtgtcctgcaaggcttccggcggcaccttcagcagctacgccatttcttgggtgcgccaggctcctggacagggcctggaatggatgggcggcatcatccctatcctgggcaccgccaactacgcccagaaattccagggcagagtgaccatcaccgccgacgagagcaccagcaccgcctacatggaactgagcagcctgcggagcgaggacacagccgtgtattattgcgccagatggggcggaggggccttcgacatttggggccagggaacaatggtcaccgtgtccagcacgcgtggaggcagtggtgtcttcacactcgaagatttcgttggggactggcgacagacagccggctacaacctggaccaagtccttgaacagggaggtgtgtccagtttgtttcagaatctcggggtgtccgtaactccgatccaaaggattgtcctgagcggtgaaaatgggctgaagatcgacatccatgtcatcatcccgtatgaaggtctgagcggcgaccaaatgggccagatcgaaaaaatttttaaggtggtgtaccctgtggatgatcatcactttaaggtgatcctgcactatggcacactggtaatcgacggggttacgccgaacatgatcgactatttcggacggccctatgaaggcatcgccgtgttcgacggcaaaaagatcactgtaacagggaccctgtggaacggcaacaaaattatcgacgagcgcctgatcaaccccgacggctccctgctgttccgagtaaccatcaacggagtgaccggctggcggctgtgcgaacgcattctggcgctcgagggaggcagctggagccaccctcagtttgaaaaagactacaaagacgatgacgataagggatcagattacaaggatgatgatgacaaggggtcagattataaagacgacgatgataaagggagcgactacaaggacgacgatgacaaggcctggtcccatccccagttcgagaaacaccatcaccaccaccatcatcacactagtggctccggcgagggcagaggaagtctactaacctgcggagatgtggaagaaaatcctggcccacatatgaccgagtacaagcccacggtgcgcctcgccacccgcgacgacgtccccagggccgtacgcaccctcgccgccgcgttcgccgactaccccgccacgcgccacaccgtcgatccggaccgccacatcgagcgggtcaccgagctgcaagaactcttcctcacgcgcgtcgggctcgacatcggcaaggtgtgggtcgcggacgacggcgccgcggtggcggtctggaccacgccggagagcgtcgaagcgggggcggtgttcgccgagatcggcccgcgcatggccgagttgagcggttcccggctggccgcgcagcaacagatggaaggcctcctggcgccgcaccggcccaaggagcccgcgtggttcctggccaccgtcggcgtctcgcccgaccaccagggcaagggtctgggcagcgccgtcgtgctccccggagtggaggcggccgagcgcgccggggtgcccgccttcctggagacctccgcgccccgcaacctccccttctacgagcggctcggcttcaccgtcaccgccgacgtcgaggtgcccgaaggaccgcgcacctggtgcatgacccgcaagcccggtgcctga

SEQ ID NO: 9105 - DNA, 2202 bp, synthetic construct
  source 1..2202: mol_type = other DNA
atggccttaccagtgaccgccttgctcctgccgctggccttgctgctccacgccgccaggccggacatcgtgctgacccagagccctctgagcctggccgtgtctctgggacagcctgccatcatcagctgcaaggccagccagagcgtgtcctttgccggcacctctctgatgcactggtatcaccagaagcccggccagcagcccagactgctgatctacagagccagcaacctggaagccggcgtgcccgatagattttccggcagcggcagcaagaccgacttcaccctgaccatcagccccgtggaagccgaagatgccgccacctactactgccagcagagcagagagtacccctacaccttcggcggaggcaccaagctggaaatcaagaggggcggaggcggaagtggaggcggaggatctggcggcggaggctctcaggtccaactggtgcagagcggagccgaggtcgtgaagcctggcgcttccgtgaagattagctgcaaagccagcggctacacctttaccggctactttatgaactgggtcaagcagagccctggccagagcctggaatggatcggcagaatccacccctacgacggcgacaccttctacaaccagaagttccagggcaaggccaccctgacagtggacaagagcagcaacaccgcccacatggaactgctgagcctgaccagcgaggacttcgccgtgtactactgcaccagatacgacggcagccgggctatggactattggggccagggcaccaccgtgaccgtgtctagtacgcgtggaggcagtggtgtcttcacactcgaagatttcgttggggactggcgacagacagccggctacaacctggaccaagtccttgaacagggaggtgtgtccagtttgtttcagaatctcggggtgtccgtaactccgatccaaaggattgtcctgagcggtgaaaatgggctgaagatcgacatccatgtcatcatcccgtatgaaggtctgagcggcgaccaaatgggccagatcgaaaaaatttttaaggtggtgtaccctgtggatgatcatcactttaaggtgatcctgcactatggcacactggtaatcgacggggttacgccgaacatgatcgactatttcggacggccctatgaaggcatcgccgtgttcgacggcaaaaagatcactgtaacagggaccctgtggaacggcaacaaaattatcgacgagcgcctgatcaaccccgacggctccctgctgttccgagtaaccatcaacggagtgaccggctggcggctgtgcgaacgcattctggcgctcgagggaggcagctggagccaccctcagtttgaaaaagactacaaagacgatgacgataagggatcagattacaaggatgatgatgacaaggggtcagattataaagacgacgatgataaagggagcgactacaaggacgacgatgacaaggcctggtcccatccccagttcgagaaacaccatcaccaccaccatcatcacactagtggctccggcgagggcagaggaagtctactaacctgcggagatgtggaagaaaatcctggcccacatatgaccgagtacaagcccacggtgcgcctcgccacccgcgacgacgtccccagggccgtacgcaccctcgccgccgcgttcgccgactaccccgccacgcgccacaccgtcgatccggaccgccacatcgagcgggtcaccgagctgcaagaactcttcctcacgcgcgtcgggctcgacatcggcaaggtgtgggtcgcggacgacggcgccgcggtggcggtctggaccacgccggagagcgtcgaagcgggggcggtgttcgccgagatcggcccgcgcatggccgagttgagcggttcccggctggccgcgcagcaacagatggaaggcctcctggcgccgcaccggcccaaggagcccgcgtggttcctggccaccgtcggcgtctcgcccgaccaccagggcaagggtctgggcagcgccgtcgtgctccccggagtggaggcggccgagcgcgccggggtgcccgccttcctggagacctccgcgccccgcaacctccccttctacgagcggctcggcttcaccgtcaccgccgacgtcgaggtgcccgaaggaccgcgcacctggtgcatgacccgcaagcccggtgcctga

SEQ ID NO: 9106 - DNA, 2235 bp, synthetic construct
  source 1..2235: mol_type = other DNA
atggccttaccagtgaccgccttgctcctgccgctggccttgctgctccacgccgccaggccgcaggttcagctccagcagtctggacctggcctggtcaagcctagccagacactgtctctgacctgtgccatcagcggcgatagcgtgtcctctaatagagccgcctggaactggatcagacagagccctagcagaggactccagtggctgggcagaacctactaccgcagcaagtggtacaacgactacgccgtgtctctgcggagccggatcaccatcaatcccgtgaccagcaagaaccaggtggccctgcacatgaacagcgtgacccctgaagataccgccgtgtactactgtgccagagccggaattgtggtggtgcccggacctgagacattctactactacgaccacggcctggacgtgtggggccagggaacaacagtgactgtctcttctggaggcggtggatctggcggcggaggtagtggtggtggcggatctgacatccagatgacacagagcccctctagcctgtctgccagcgtgggagacagagtgaccatcacctgtagagccagccagagcatcagaaactacctgaactggtatcagcaaaagcccggcaaggcccctgagctgctgattcatgctgcaagcagcctccagagcggcgtgccaagcagattttctggcagcggcagcggaaccgacttcaccctgacaatatctagcctccagcctgaggacttcgccagctactactgccagcagagctacagcgcccctcctatcacctttggacagggcaccagactggaaatcaagacgcgtggaggcagtggtgtcttcacactcgaagatttcgttggggactggcgacagacagccggctacaacctggaccaagtccttgaacagggaggtgtgtccagtttgtttcagaatctcggggtgtccgtaactccgatccaaaggattgtcctgagcggtgaaaatgggctgaagatcgacatccatgtcatcatcccgtatgaaggtctgagcggcgaccaaatgggccagatcgaaaaaatttttaaggtggtgtaccctgtggatgatcatcactttaaggtgatcctgcactatggcacactggtaatcgacggggttacgccgaacatgatcgactatttcggacggccctatgaaggcatcgccgtgttcgacggcaaaaagatcactgtaacagggaccctgtggaacggcaacaaaattatcgacgagcgcctgatcaaccccgacggctccctgctgttccgagtaaccatcaacggagtgaccggctggcggctgtgcgaacgcattctggcgctcgagggaggcagctggagccaccctcagtttgaaaaagactacaaagacgatgacgataagggatcagattacaaggatgatgatgacaaggggtcagattataaagacgacgatgataaagggagcgactacaaggacgacgatgacaaggcctggtcccatccccagttcgagaaacaccatcaccaccaccatcatcacactagtggctccggcgagggcagaggaagtctactaacctgcggagatgtggaagaaaatcctggcccacatatgaccgagtacaagcccacggtgcgcctcgccacccgcgacgacgtccccagggccgtacgcaccctcgccgccgcgttcgccgactaccccgccacgcgccacaccgtcgatccggaccgccacatcgagcgggtcaccgagctgcaagaactcttcctcacgcgcgtcgggctcgacatcggcaaggtgtgggtcgcggacgacggcgccgcggtggcggtctggaccacgccggagagcgtcgaagcgggggcggtgttcgccgagatcggcccgcgcatggccgagttgagcggttcccggctggccgcgcagcaacagatggaaggcctcctggcgccgcaccggcccaaggagcccgcgtggttcctggccaccgtcggcgtctcgcccgaccaccagggcaagggtctgggcagcgccgtcgtgctccccggagtggaggcggccgagcgcgccggggtgcccgccttcctggagacctccgcgccccgcaacctccccttctacgagcggctcggcttcaccgtcaccgccgacgtcgaggtgcccgaaggaccgcgcacctggtgcatgacccgcaagcccggtgcctga

SEQ ID NO: 9107 - DNA, 2196 bp, synthetic construct
  source 1..2196: mol_type = other DNA
atggccttaccagtgaccgccttgctcctgccgctggccttgctgctccacgccgccaggccggaggttcagctgcttgagacaggcggaggactggttcaacctggcggaagcagaggactgagctgtgaaggcagcggctttaccttcagcggcttctggatgagctgggtccgacagacacctggcaagaccctggaatggatcggcgacatcaatagcgacggcagcagcatcaactacgcccctagcatcaaggacaggttcaccatcttccgggacaacgacaagagcatcctgtacctccagatgaccaacgtgcggagcgaggacaccggcacctacttttgtgtgaccacctacggcgactactggggccagggaacaaccctgacagtgtctagtgcttctggcggaggcggaagtggaggcggaggatctggcggcggaggctctgatattgtgatgacccagagccagaaattcatgagcaccagcgtgggcgacagagtgtccgtgacatgtaaagccagccagaacgtgggctctcacgtcggctggtatcagcagaagtctggacagagccccaaggcactgatctacagcgccagcaatcggtacatcggcgtgcccgatagattcaccggctctggcagcggcaccgatttcaccctgaccatcagcaacgtgcagtccgaggacctggccgagtatttctgccagcagtaccacatctacccctacacctttggaggcggcacccggctggaaatcaagagaacagtggctgccacgcgtggaggcagtggtgtcttcacactcgaagatttcgttggggactggcgacagacagccggctacaacctggaccaagtccttgaacagggaggtgtgtccagtttgtttcagaatctcggggtgtccgtaactccgatccaaaggattgtcctgagcggtgaaaatgggctgaagatcgacatccatgtcatcatcccgtatgaaggtctgagcggcgaccaaatgggccagatcgaaaaaatttttaaggtggtgtaccctgtggatgatcatcactttaaggtgatcctgcactatggcacactggtaatcgacggggttacgccgaacatgatcgactatttcggacggccctatgaaggcatcgccgtgttcgacggcaaaaagatcactgtaacagggaccctgtggaacggcaacaaaattatcgacgagcgcctgatcaaccccgacggctccctgctgttccgagtaaccatcaacggagtgaccggctggcggctgtgcgaacgcattctggcgctcgagggaggcagctggagccaccctcagtttgaaaaagactacaaagacgatgacgataagggatcagattacaaggatgatgatgacaaggggtcagattataaagacgacgatgataaagggagcgactacaaggacgacgatgacaaggcctggtcccatccccagttcgagaaacaccatcaccaccaccatcatcacactagtggctccggcgagggcagaggaagtctactaacctgcggagatgtggaagaaaatcctggcccacatatgaccgagtacaagcccacggtgcgcctcgccacccgcgacgacgtccccagggccgtacgcaccctcgccgccgcgttcgccgactaccccgccacgcgccacaccgtcgatccggaccgccacatcgagcgggtcaccgagctgcaagaactcttcctcacgcgcgtcgggctcgacatcggcaaggtgtgggtcgcggacgacggcgccgcggtggcggtctggaccacgccggagagcgtcgaagcgggggcggtgttcgccgagatcggcccgcgcatggccgagttgagcggttcccggctggccgcgcagcaacagatggaaggcctcctggcgccgcaccggcccaaggagcccgcgtggttcctggccaccgtcggcgtctcgcccgaccaccagggcaagggtctgggcagcgccgtcgtgctccccggagtggaggcggccgagcgcgccggggtgcccgccttcctggagacctccgcgccccgcaacctccccttctacgagcggctcggcttcaccgtcaccgccgacgtcgaggtgcccgaaggaccgcgcacctggtgcatgacccgcaagcccggtgcctga

SEQ ID NO: 9108 - DNA, 2196 bp, synthetic construct
  source 1..2196: mol_type = other DNA
atggccttaccagtgaccgccttgctcctgccgctggccttgctgctccacgccgccaggccggatattgtgatgacccagagccagaaattcatgagcaccagcgtgggcgacagagtgtccgtgacatgtaaagccagccagaacgtgggcacccacgtcgcatggtatcagcagaagtctggacagagccccaaggcactgatctacagcgccagcaatcggtacaccggcgtgcccgatagattcaccggctctggcagcggcaccgatttcaccctgaccatcagcaacgtgcagtccgaggacctggccgagtatttctgccagcagtaccacatctacccctacacctttggaggcggcacccggctggaaatcaagagaacagtggctgccggaggcggtggatctggcggcggaggtagtggtggtggcggatctgaggttcagctgcttgagacaggcggaggactggttcaacctggcggaagcagaggactgagctgtgaaggcagcggctttaccttcagcggcttctggatgagctgggtccgacagacacctggcaagaccctggaatggatcggcgacatcaatagcgacggcagcgccatcaactacgcccctagcatcaaggacaggttcaccatcttccgggacaacgacaagaacatcctgtacctccagatgaccaacgtgcggagcgaggacaccggcacctacttttgtgtgaccacctacggcgactactggggccagggaacaaccctgacagtgtctagtgcttctacgcgtggaggcagtggtgtcttcacactcgaagatttcgttggggactggcgacagacagccggctacaacctggaccaagtccttgaacagggaggtgtgtccagtttgtttcagaatctcggggtgtccgtaactccgatccaaaggattgtcctgagcggtgaaaatgggctgaagatcgacatccatgtcatcatcccgtatgaaggtctgagcggcgaccaaatgggccagatcgaaaaaatttttaaggtggtgtaccctgtggatgatcatcactttaaggtgatcctgcactatggcacactggtaatcgacggggttacgccgaacatgatcgactatttcggacggccctatgaaggcatcgccgtgttcgacggcaaaaagatcactgtaacagggaccctgtggaacggcaacaaaattatcgacgagcgcctgatcaaccccgacggctccctgctgttccgagtaaccatcaacggagtgaccggctggcggctgtgcgaacgcattctggcgctcgagggaggcagctggagccaccctcagtttgaaaaagactacaaagacgatgacgataagggatcagattacaaggatgatgatgacaaggggtcagattataaagacgacgatgataaagggagcgactacaaggacgacgatgacaaggcctggtcccatccccagttcgagaaacaccatcaccaccaccatcatcacactagtggctccggcgagggcagaggaagtctactaacctgcggagatgtggaagaaaatcctggcccacatatgaccgagtacaagcccacggtgcgcctcgccacccgcgacgacgtccccagggccgtacgcaccctcgccgccgcgttcgccgactaccccgccacgcgccacaccgtcgatccggaccgccacatcgagcgggtcaccgagctgcaagaactcttcctcacgcgcgtcgggctcgacatcggcaaggtgtgggtcgcggacgacggcgccgcggtggcggtctggaccacgccggagagcgtcgaagcgggggcggtgttcgccgagatcggcccgcgcatggccgagttgagcggttcccggctggccgcgcagcaacagatggaaggcctcctggcgccgcaccggcccaaggagcccgcgtggttcctggccaccgtcggcgtctcgcccgaccaccagggcaagggtctgggcagcgccgtcgtgctccccggagtggaggcggccgagcgcgccggggtgcccgccttcctggagacctccgcgccccgcaacctccccttctacgagcggctcggcttcaccgtcaccgccgacgtcgaggtgcccgaaggaccgcgcacctggtgcatgacccgcaagcccggtgcctga

SEQ ID NO: 9109 - DNA, 2196 bp, synthetic construct
  source 1..2196: mol_type = other DNA
atggccttaccagtgaccgccttgctcctgccgctggccttgctgctccacgccgccaggccggatattgtgatgacccagagccagaaattcatgagcaccagcgtgggcgacagagtgtccgtgacatgtaaagccagccagaacgtgggctctaacgtcgcatggtatcagcagaagtctggacagagccccaaggcactgatctacagcgccagcaatcggtacaacggcgtgcccgatagattcaccggctctggcagcggcaccgatttcaccctgaccatcagcaacgtgcagtccgaggacctggccgagtatttctgccagcagtaccacatctacccctacacctttggaggcggcacccggctggaaatcaagagaacagtggctgccggaggcggtggatctggcggcggaggtagtggtggtggcggatctgaggttcagctgcttgagacaggcggaggactggttcaacctggcggaagcagaggactgagctgtgaaggcagcggctttaccttcagcggcttctggatgagctgggtccgacagacacctggcaagaccctggaatggatcggcgacatcaatagcgacggcagcgccgtcaactacgcccctagcatcaaggacaggttcaccatcttccgggacaacgacaagaacatcctgtacctccagatgaccaacgtgcggagcgaggacaccggcacctacttttgtgtgaccacctacggcgactactggggccagggaacaaccctgacagtgtctagtgcttctacgcgtggaggcagtggtgtcttcacactcgaagatttcgttggggactggcgacagacagccggctacaacctggaccaagtccttgaacagggaggtgtgtccagtttgtttcagaatctcggggtgtccgtaactccgatccaaaggattgtcctgagcggtgaaaatgggctgaagatcgacatccatgtcatcatcccgtatgaaggtctgagcggcgaccaaatgggccagatcgaaaaaatttttaaggtggtgtaccctgtggatgatcatcactttaaggtgatcctgcactatggcacactggtaatcgacggggttacgccgaacatgatcgactatttcggacggccctatgaaggcatcgccgtgttcgacggcaaaaagatcactgtaacagggaccctgtggaacggcaacaaaattatcgacgagcgcctgatcaaccccgacggctccctgctgttccgagtaaccatcaacggagtgaccggctggcggctgtgcgaacgcattctggcgctcgagggaggcagctggagccaccctcagtttgaaaaagactacaaagacgatgacgataagggatcagattacaaggatgatgatgacaaggggtcagattataaagacgacgatgataaagggagcgactacaaggacgacgatgacaaggcctggtcccatccccagttcgagaaacaccatcaccaccaccatcatcacactagtggctccggcgagggcagaggaagtctactaacctgcggagatgtggaagaaaatcctggcccacatatgaccgagtacaagcccacggtgcgcctcgccacccgcgacgacgtccccagggccgtacgcaccctcgccgccgcgttcgccgactaccccgccacgcgccacaccgtcgatccggaccgccacatcgagcgggtcaccgagctgcaagaactcttcctcacgcgcgtcgggctcgacatcggcaaggtgtgggtcgcggacgacggcgccgcggtggcggtctggaccacgccggagagcgtcgaagcgggggcggtgttcgccgagatcggcccgcgcatggccgagttgagcggttcccggctggccgcgcagcaacagatggaaggcctcctggcgccgcaccggcccaaggagcccgcgtggttcctggccaccgtcggcgtctcgcccgaccaccagggcaagggtctgggcagcgccgtcgtgctccccggagtggaggcggccgagcgcgccggggtgcccgccttcctggagacctccgcgccccgcaacctccccttctacgagcggctcggcttcaccgtcaccgccgacgtcgaggtgcccgaaggaccgcgcacctggtgcatgacccgcaagcccggtgcctga

SEQ ID NO: 9110 - DNA, 1842 bp, synthetic construct
  source 1..1842: mol_type = other DNA
atggccctgcctgtgacagctctgctgctgcctctggcactgctgctgcacgccgccagacctcaagtgaagctggtggaatctggcggcggatctgttcaggctggcggatctctgagactgagctgtgtggccagcggctacgcctactctccttactgcatggcctggttcagacaggcccctggcaaagagagagagggcgtcgcctctatctataccggaagcggcgccacctactatcccgactctgtgaagggcagattcaccatcagccaggacaaggccaaggacaccctgtacctgcagatgaacagcctgaagcctgaggacaccgccatgtactattgcgccgctgcctacgacctgagaagctgtggcggcacctggtacagattcagacactggggccagggcacccaagtgacagtctcttctacgcgtggaggcagtggtgtcttcacactcgaagatttcgttggggactggcgacagacagccggctacaacctggaccaagtccttgaacagggaggtgtgtccagtttgtttcagaatctcggggtgtccgtaactccgatccaaaggattgtcctgagcggtgaaaatgggctgaagatcgacatccatgtcatcatcccgtatgaaggtctgagcggcgaccaaatgggccagatcgaaaaaatttttaaggtggtgtaccctgtggatgatcatcactttaaggtgatcctgcactatggcacactggtaatcgacggggttacgccgaacatgatcgactatttcggacggccctatgaaggcatcgccgtgttcgacggcaaaaagatcactgtaacagggaccctgtggaacggcaacaaaattatcgacgagcgcctgatcaaccccgacggctccctgctgttccgagtaaccatcaacggagtgaccggctggcggctgtgcgaacgcattctggcgctcgagggaggcagctggagccaccctcagtttgaaaaagactacaaagacgatgacgataagggatcagattacaaggatgatgatgacaaggggtcagattataaagacgacgatgataaagggagcgactacaaggacgacgatgacaaggcctggtcccatccccagttcgagaaacaccatcaccaccaccatcatcacactagtggctccggcgagggcagaggaagtctactaacctgcggagatgtggaagaaaatcctggcccacatatgaccgagtacaagcccacggtgcgcctcgccacccgcgacgacgtccccagggccgtacgcaccctcgccgccgcgttcgccgactaccccgccacgcgccacaccgtcgatccggaccgccacatcgagcgggtcaccgagctgcaagaactcttcctcacgcgcgtcgggctcgacatcggcaaggtgtgggtcgcggacgacggcgccgcggtggcggtctggaccacgccggagagcgtcgaagcgggggcggtgttcgccgagatcggcccgcgcatggccgagttgagcggttcccggctggccgcgcagcaacagatggaaggcctcctggcgccgcaccggcccaaggagcccgcgtggttcctggccaccgtcggcgtctcgcccgaccaccagggcaagggtctgggcagcgccgtcgtgctccccggagtggaggcggccgagcgcgccggggtgcccgccttcctggagacctccgcgccccgcaacctccccttctacgagcggctcggcttcaccgtcaccgccgacgtcgaggtgcccgaaggaccgcgcacctggtgcatgacccgcaagcccggtgcctga

SEQ ID NO: 9111 - DNA, 2187 bp, synthetic construct
  source 1..2187: mol_type = other DNA
atggccttaccagtgaccgccttgctcctgccgctggccttgctgctccacgccgccaggccggctcaggtgctgacacagacacctagctctgtgtctgccgccgttggcggcacagtgaccattaactgtcaggccagccagagcgtgtacaagaacaactacctgagctggtatcagcagaagcccggccagcctcctagactgctgatctacgatgccagcacactggccagcggagtgcccagtagattcaaaggctctggcagcggcacccagttcaccctgacaatttctggcgtgcagtgcgacgatgccgccacctattattgcctgggcgagttcagctgtagcagcggagattgtgccgcctttggaggcggaacagaggtggtggtcaaaggaggcggtggatctggcggcggaggtagtggtggtggcggatctcagtctgtggaagaaagcggaggcagactggtcacccctggcacacctctgacactgacctgtaccgtgtccggcatcgacctgagcagctacgccatgacatgggtccgacaagctccaggcgaaggactggaatggatcggcaccatcaacaccatcagcaccgcctactatgccaactgggccaagggcagattcaccatctccaagaccagcaccaccgtggacctgaagatcgcctctcctaccaccgaggacaccgccacatacttttgcgccagagatcacggctactacgacgtgtggggacagggcacactcgtgacagtctcttctacgcgtggaggcagtggtgtcttcacactcgaagatttcgttggggactggcgacagacagccggctacaacctggaccaagtccttgaacagggaggtgtgtccagtttgtttcagaatctcggggtgtccgtaactccgatccaaaggattgtcctgagcggtgaaaatgggctgaagatcgacatccatgtcatcatcccgtatgaaggtctgagcggcgaccaaatgggccagatcgaaaaaatttttaaggtggtgtaccctgtggatgatcatcactttaaggtgatcctgcactatggcacactggtaatcgacggggttacgccgaacatgatcgactatttcggacggccctatgaaggcatcgccgtgttcgacggcaaaaagatcactgtaacagggaccctgtggaacggcaacaaaattatcgacgagcgcctgatcaaccccgacggctccctgctgttccgagtaaccatcaacggagtgaccggctggcggctgtgcgaacgcattctggcgctcgagggaggcagctggagccaccctcagtttgaaaaagactacaaagacgatgacgataagggatcagattacaaggatgatgatgacaaggggtcagattataaagacgacgatgataaagggagcgactacaaggacgacgatgacaaggcctggtcccatccccagttcgagaaacaccatcaccaccaccatcatcacactagtggctccggcgagggcagaggaagtctactaacctgcggagatgtggaagaaaatcctggcccacatatgaccgagtacaagcccacggtgcgcctcgccacccgcgacgacgtccccagggccgtacgcaccctcgccgccgcgttcgccgactaccccgccacgcgccacaccgtcgatccggaccgccacatcgagcgggtcaccgagctgcaagaactcttcctcacgcgcgtcgggctcgacatcggcaaggtgtgggtcgcggacgacggcgccgcggtggcggtctggaccacgccggagagcgtcgaagcgggggcggtgttcgccgagatcggcccgcgcatggccgagttgagcggttcccggctggccgcgcagcaacagatggaaggcctcctggcgccgcaccggcccaaggagcccgcgtggttcctggccaccgtcggcgtctcgcccgaccaccagggcaagggtctgggcagcgccgtcgtgctccccggagtggaggcggccgagcgcgccggggtgcccgccttcctggagacctccgcgccccgcaacctccccttctacgagcggctcggcttcaccgtcaccgccgacgtcgaggtgcccgaaggaccgcgcacctggtgcatgacccgcaagcccggtgcctga

SEQ ID NO: 9112 - DNA, 1821 bp, synthetic construct
  source 1..1821: mol_type = other DNA
atggccttaccagtgaccgccttgctcctgccgctggccttgctgctccacgccgccaggccggaggtgcagctggttgaatctggcggaggactggttcagcctggcggatctctgagactgtcttgtgccgccagcggcatcatcttcagcaattgtggcctggcctggtacagacaggcccctggcaaagagagagagctggtttccagcatcagcagacggggcaccaccatctacgccgactctgtgaaaggcagagccaccatcagccgggacaacagcaagaacaccctgtacctgcagatgaacagcctgagagccgaggacacagccgtgtacagctgcacaacagatcctcagctgggactgtgcgccagagattggggacagggaacactggtcaccgtgtctagtacgcgtggaggcagtggtgtcttcacactcgaagatttcgttggggactggcgacagacagccggctacaacctggaccaagtccttgaacagggaggtgtgtccagtttgtttcagaatctcggggtgtccgtaactccgatccaaaggattgtcctgagcggtgaaaatgggctgaagatcgacatccatgtcatcatcccgtatgaaggtctgagcggcgaccaaatgggccagatcgaaaaaatttttaaggtggtgtaccctgtggatgatcatcactttaaggtgatcctgcactatggcacactggtaatcgacggggttacgccgaacatgatcgactatttcggacggccctatgaaggcatcgccgtgttcgacggcaaaaagatcactgtaacagggaccctgtggaacggcaacaaaattatcgacgagcgcctgatcaaccccgacggctccctgctgttccgagtaaccatcaacggagtgaccggctggcggctgtgcgaacgcattctggcgctcgagggaggcagctggagccaccctcagtttgaaaaagactacaaagacgatgacgataagggatcagattacaaggatgatgatgacaaggggtcagattataaagacgacgatgataaagggagcgactacaaggacgacgatgacaaggcctggtcccatccccagttcgagaaacaccatcaccaccaccatcatcacactagtggctccggcgagggcagaggaagtctactaacctgcggagatgtggaagaaaatcctggcccacatatgaccgagtacaagcccacggtgcgcctcgccacccgcgacgacgtccccagggccgtacgcaccctcgccgccgcgttcgccgactaccccgccacgcgccacaccgtcgatccggaccgccacatcgagcgggtcaccgagctgcaagaactcttcctcacgcgcgtcgggctcgacatcggcaaggtgtgggtcgcggacgacggcgccgcggtggcggtctggaccacgccggagagcgtcgaagcgggggcggtgttcgccgagatcggcccgcgcatggccgagttgagcggttcccggctggccgcgcagcaacagatggaaggcctcctggcgccgcaccggcccaaggagcccgcgtggttcctggccaccgtcggcgtctcgcccgaccaccagggcaagggtctgggcagcgccgtcgtgctccccggagtggaggcggccgagcgcgccggggtgcccgccttcctggagacctccgcgccccgcaacctccccttctacgagcggctcggcttcaccgtcaccgccgacgtcgaggtgcccgaaggaccgcgcacctggtgcatgacccgcaagcccggtgcctga

SEQ ID NO: 9113 - DNA, 1842 bp, synthetic construct
  source 1..1842: mol_type = other DNA
atggccctgcctgtgacagctctgctgctgcctctggcactgctgctgcacgccgccagacctgaagtgcagctgctggaatctggcggaggactggttcaacctggcggctctctgagactgtcttgtgccgccagcggctacgcctactctccttactgtatggcctggttcagacaggcccctggcaaaggacttgagggcgtgtccagcatctacacaggatctggcgccacctactacgccgactctgtgaagggcagattcaccatcagccgggacaacagcaagaacaccctgtacctgcagatgaacagcctgagagccgaggacaccgccgtgtactattgtgccgctgcctacgacctgagaagctgtggcggaacctggtacagattcagacactggggccagggcaccctggtcacagtttcttctacgcgtggaggcagtggtgtcttcacactcgaagatttcgttggggactggcgacagacagccggctacaacctggaccaagtccttgaacagggaggtgtgtccagtttgtttcagaatctcggggtgtccgtaactccgatccaaaggattgtcctgagcggtgaaaatgggctgaagatcgacatccatgtcatcatcccgtatgaaggtctgagcggcgaccaaatgggccagatcgaaaaaatttttaaggtggtgtaccctgtggatgatcatcactttaaggtgatcctgcactatggcacactggtaatcgacggggttacgccgaacatgatcgactatttcggacggccctatgaaggcatcgccgtgttcgacggcaaaaagatcactgtaacagggaccctgtggaacggcaacaaaattatcgacgagcgcctgatcaaccccgacggctccctgctgttccgagtaaccatcaacggagtgaccggctggcggctgtgcgaacgcattctggcgctcgagggaggcagctggagccaccctcagtttgaaaaagactacaaagacgatgacgataagggatcagattacaaggatgatgatgacaaggggtcagattataaagacgacgatgataaagggagcgactacaaggacgacgatgacaaggcctggtcccatccccagttcgagaaacaccatcaccaccaccatcatcacactagtggctccggcgagggcagaggaagtctactaacctgcggagatgtggaagaaaatcctggcccacatatgaccgagtacaagcccacggtgcgcctcgccacccgcgacgacgtccccagggccgtacgcaccctcgccgccgcgttcgccgactaccccgccacgcgccacaccgtcgatccggaccgccacatcgagcgggtcaccgagctgcaagaactcttcctcacgcgcgtcgggctcgacatcggcaaggtgtgggtcgcggacgacggcgccgcggtggcggtctggaccacgccggagagcgtcgaagcgggggcggtgttcgccgagatcggcccgcgcatggccgagttgagcggttcccggctggccgcgcagcaacagatggaaggcctcctggcgccgcaccggcccaaggagcccgcgtggttcctggccaccgtcggcgtctcgcccgaccaccagggcaagggtctgggcagcgccgtcgtgctccccggagtggaggcggccgagcgcgccggggtgcccgccttcctggagacctccgcgccccgcaacctccccttctacgagcggctcggcttcaccgtcaccgccgacgtcgaggtgcccgaaggaccgcgcacctggtgcatgacccgcaagcccggtgcctga

SEQ ID NO: 9114 - DNA, 1842 bp, synthetic construct
  source 1..1842: mol_type = other DNA
atggccctgcctgtgacagctctgctgctgcctctggcactgctgctgcacgccgccagacctgaagtgcagctgctggaatctggcggaggactggttcaacctggcggctctctgagactgtcttgtgccgccagcggctacgcctactctccttactgtatggcctggttcagacaggcccctggcaaaggacttgagggcgtgtccagcatctacacaggatctggcagcacctactacgccgactctgtgaagggcagattcaccatcagccgggacaacagcaagaacaccctgtacctgcagatgaacagcctgagagccgaggacaccgccgtgtactattgtgccgctgcctacgacctgagaagctgtggcggaacctggtacagattcagacactggggccagggcaccctggtcacagtttcttctacgcgtggaggcagtggtgtcttcacactcgaagatttcgttggggactggcgacagacagccggctacaacctggaccaagtccttgaacagggaggtgtgtccagtttgtttcagaatctcggggtgtccgtaactccgatccaaaggattgtcctgagcggtgaaaatgggctgaagatcgacatccatgtcatcatcccgtatgaaggtctgagcggcgaccaaatgggccagatcgaaaaaatttttaaggtggtgtaccctgtggatgatcatcactttaaggtgatcctgcactatggcacactggtaatcgacggggttacgccgaacatgatcgactatttcggacggccctatgaaggcatcgccgtgttcgacggcaaaaagatcactgtaacagggaccctgtggaacggcaacaaaattatcgacgagcgcctgatcaaccccgacggctccctgctgttccgagtaaccatcaacggagtgaccggctggcggctgtgcgaacgcattctggcgctcgagggaggcagctggagccaccctcagtttgaaaaagactacaaagacgatgacgataagggatcagattacaaggatgatgatgacaaggggtcagattataaagacgacgatgataaagggagcgactacaaggacgacgatgacaaggcctggtcccatccccagttcgagaaacaccatcaccaccaccatcatcacactagtggctccggcgagggcagaggaagtctactaacctgcggagatgtggaagaaaatcctggcccacatatgaccgagtacaagcccacggtgcgcctcgccacccgcgacgacgtccccagggccgtacgcaccctcgccgccgcgttcgccgactaccccgccacgcgccacaccgtcgatccggaccgccacatcgagcgggtcaccgagctgcaagaactcttcctcacgcgcgtcgggctcgacatcggcaaggtgtgggtcgcggacgacggcgccgcggtggcggtctggaccacgccggagagcgtcgaagcgggggcggtgttcgccgagatcggcccgcgcatggccgagttgagcggttcccggctggccgcgcagcaacagatggaaggcctcctggcgccgcaccggcccaaggagcccgcgtggttcctggccaccgtcggcgtctcgcccgaccaccagggcaagggtctgggcagcgccgtcgtgctccccggagtggaggcggccgagcgcgccggggtgcccgccttcctggagacctccgcgccccgcaacctccccttctacgagcggctcggcttcaccgtcaccgccgacgtcgaggtgcccgaaggaccgcgcacctggtgcatgacccgcaagcccggtgcctga

SEQ ID NO: 9115 - DNA, 1842 bp, synthetic construct
  source 1..1842: mol_type = other DNA
atggccctgcctgtgacagctctgctgctgcctctggcactgctgctgcacgccgccagacctcaagtgaagctggtggaatctggcggcggatctgttcaggctggcggatctctgagactgagctgtgtggccagcggctacgcctactctccttactgcatggcctggttcagacaggcccctggcaaagagagagagggcgtcgcctctatctataccggaagcggcgccacctactatcccgactctgtgaagggcagattcaccatcagccaggacaaggccaaggacaccctgtacctgcagatgaacagcctgaagcctgaggacaccgccatgtactattgcgccgctgcctacgacctgagaagctgtggcggcagctggtacagattcagacactggggccagggcacccaagtgacagtctcttctacgcgtggaggcagtggtgtcttcacactcgaagatttcgttggggactggcgacagacagccggctacaacctggaccaagtccttgaacagggaggtgtgtccagtttgtttcagaatctcggggtgtccgtaactccgatccaaaggattgtcctgagcggtgaaaatgggctgaagatcgacatccatgtcatcatcccgtatgaaggtctgagcggcgaccaaatgggccagatcgaaaaaatttttaaggtggtgtaccctgtggatgatcatcactttaaggtgatcctgcactatggcacactggtaatcgacggggttacgccgaacatgatcgactatttcggacggccctatgaaggcatcgccgtgttcgacggcaaaaagatcactgtaacagggaccctgtggaacggcaacaaaattatcgacgagcgcctgatcaaccccgacggctccctgctgttccgagtaaccatcaacggagtgaccggctggcggctgtgcgaacgcattctggcgctcgagggaggcagctggagccaccctcagtttgaaaaagactacaaagacgatgacgataagggatcagattacaaggatgatgatgacaaggggtcagattataaagacgacgatgataaagggagcgactacaaggacgacgatgacaaggcctggtcccatccccagttcgagaaacaccatcaccaccaccatcatcacactagtggctccggcgagggcagaggaagtctactaacctgcggagatgtggaagaaaatcctggcccacatatgaccgagtacaagcccacggtgcgcctcgccacccgcgacgacgtccccagggccgtacgcaccctcgccgccgcgttcgccgactaccccgccacgcgccacaccgtcgatccggaccgccacatcgagcgggtcaccgagctgcaagaactcttcctcacgcgcgtcgggctcgacatcggcaaggtgtgggtcgcggacgacggcgccgcggtggcggtctggaccacgccggagagcgtcgaagcgggggcggtgttcgccgagatcggcccgcgcatggccgagttgagcggttcccggctggccgcgcagcaacagatggaaggcctcctggcgccgcaccggcccaaggagcccgcgtggttcctggccaccgtcggcgtctcgcccgaccaccagggcaagggtctgggcagcgccgtcgtgctccccggagtggaggcggccgagcgcgccggggtgcccgccttcctggagacctccgcgccccgcaacctccccttctacgagcggctcggcttcaccgtcaccgccgacgtcgaggtgcccgaaggaccgcgcacctggtgcatgacccgcaagcccggtgcctga

SEQ ID NO: 9116 - DNA, 1821 bp, synthetic construct
  source 1..1821: mol_type = other DNA
atggccttaccagtgaccgccttgctcctgccgctggccttgctgctccacgccgccaggccggaggtgcagctggttgaatctggcggaggactggttcagcctggcggatctctgagactgtcttgtgccgccagcggcatcatcttcagcaattgtggcctggcctggtacagacaggcccctggcaaagagagagagctggtttccagcatcagcagacggggcaccaccatctacgccgactctgtgaaaggcagagccaccatcagccgggacaacagcaagaacaccctgtacctgcagatgaacagcctgagagccgaggacacagccgtgtacagctgcacaacagagcctcagctgggactgtgcgccagagattggggacagggaacactggtcaccgtgtctagtacgcgtggaggcagtggtgtcttcacactcgaagatttcgttggggactggcgacagacagccggctacaacctggaccaagtccttgaacagggaggtgtgtccagtttgtttcagaatctcggggtgtccgtaactccgatccaaaggattgtcctgagcggtgaaaatgggctgaagatcgacatccatgtcatcatcccgtatgaaggtctgagcggcgaccaaatgggccagatcgaaaaaatttttaaggtggtgtaccctgtggatgatcatcactttaaggtgatcctgcactatggcacactggtaatcgacggggttacgccgaacatgatcgactatttcggacggccctatgaaggcatcgccgtgttcgacggcaaaaagatcactgtaacagggaccctgtggaacggcaacaaaattatcgacgagcgcctgatcaaccccgacggctccctgctgttccgagtaaccatcaacggagtgaccggctggcggctgtgcgaacgcattctggcgctcgagggaggcagctggagccaccctcagtttgaaaaagactacaaagacgatgacgataagggatcagattacaaggatgatgatgacaaggggtcagattataaagacgacgatgataaagggagcgactacaaggacgacgatgacaaggcctggtcccatccccagttcgagaaacaccatcaccaccaccatcatcacactagtggctccggcgagggcagaggaagtctactaacctgcggagatgtggaagaaaatcctggcccacatatgaccgagtacaagcccacggtgcgcctcgccacccgcgacgacgtccccagggccgtacgcaccctcgccgccgcgttcgccgactaccccgccacgcgccacaccgtcgatccggaccgccacatcgagcgggtcaccgagctgcaagaactcttcctcacgcgcgtcgggctcgacatcggcaaggtgtgggtcgcggacgacggcgccgcggtggcggtctggaccacgccggagagcgtcgaagcgggggcggtgttcgccgagatcggcccgcgcatggccgagttgagcggttcccggctggccgcgcagcaacagatggaaggcctcctggcgccgcaccggcccaaggagcccgcgtggttcctggccaccgtcggcgtctcgcccgaccaccagggcaagggtctgggcagcgccgtcgtgctccccggagtggaggcggccgagcgcgccggggtgcccgccttcctggagacctccgcgccccgcaacctccccttctacgagcggctcggcttcaccgtcaccgccgacgtcgaggtgcccgaaggaccgcgcacctggtgcatgacccgcaagcccggtgcctga

SEQ ID NO: 9117 - DNA, 1116 bp, synthetic construct
  source 1..1116: mol_type = other DNA
atggccctgcctgtgacagctctgctgctgcctctggcactgctgctgcacgccgccagacctgaagtgcagctgctggaatctggcggaggactggttcaacctggcggctctctgagactgtcttgtgccgccagcggctacgcctactctccttactgtatggcctggttcagacaggcccctggcaaaggacttgagggcgtgtccagcatctacacaggatctggcgccacctactacgccgactctgtgaagggcagattcaccatcagccgggacaacagcaagaacaccctgtacctgcagatgaacagcctgagagccgaggacaccgccgtgtactattgtgccgctgcctacgacctgagaagctgtggcggaacctggtacagattcagacactggggccagggcaccctggtcacagtttcttctacgcgtaccacgacgccagcgccgcgaccaccaacaccggcgcccaccatcgcgtcgcagcccctgtccctgcgcccagaggcgtgccggccagcggcggggggcgcagtgcacacgagggggctggacttcgcctgtgacatctacatctgggcgcccttggccgggacttgtggggtccttctcctgtcactggttatcaccctttactgcaaacggggcagaaagaaactcctgtatatattcaaacaaccatttatgagaccagtacaaactactcaagaggaagatggctgtagctgccgatttccagaagaagaagaaggaggatgtgaactgagagtgaagttcagcaggagcgcagacgcccccgcgtaccagcagggccagaaccagctctataacgagctgaatctaggacgaagagaggagtacgatgttttggacaagagacgtggccgggaccctgagatggggggaaagccgagaaggaagaaccctcaggaaggcctgtacaatgaactgcagaaagataagatggcggaggcctacagtgagattgggatgaaaggcgagcgccggaggggcaaggggcacgatggcctttaccagggtctcagtacagccaccaaggacacctacgacgcccttcacatgcaggccctgccccctcgctaa

SEQ ID NO: 9118 - DNA, 1116 bp, synthetic construct
  source 1..1116: mol_type = other DNA
atggccctgcctgtgacagctctgctgctgcctctggcactgctgctgcacgccgccagacctgaagtgcagctgctggaatctggcggaggactggttcaacctggcggctctctgagactgtcttgtgccgccagcggctacgcctactctccttactgtatggcctggttcagacaggcccctggcaaaggacttgagggcgtgtccagcatctacacaggatctggcagcacctactacgccgactctgtgaagggcagattcaccatcagccgggacaacagcaagaacaccctgtacctgcagatgaacagcctgagagccgaggacaccgccgtgtactattgtgccgctgcctacgacctgagaagctgtggcggaacctggtacagattcagacactggggccagggcaccctggtcacagtttcttctacgcgtaccacgacgccagcgccgcgaccaccaacaccggcgcccaccatcgcgtcgcagcccctgtccctgcgcccagaggcgtgccggccagcggcggggggcgcagtgcacacgagggggctggacttcgcctgtgacatctacatctgggcgcccttggccgggacttgtggggtccttctcctgtcactggttatcaccctttactgcaaacggggcagaaagaaactcctgtatatattcaaacaaccatttatgagaccagtacaaactactcaagaggaagatggctgtagctgccgatttccagaagaagaagaaggaggatgtgaactgagagtgaagttcagcaggagcgcagacgcccccgcgtaccagcagggccagaaccagctctataacgagctgaatctaggacgaagagaggagtacgatgttttggacaagagacgtggccgggaccctgagatggggggaaagccgagaaggaagaaccctcaggaaggcctgtacaatgaactgcagaaagataagatggcggaggcctacagtgagattgggatgaaaggcgagcgccggaggggcaaggggcacgatggcctttaccagggtctcagtacagccaccaaggacacctacgacgcccttcacatgcaggccctgccccctcgctaa

SEQ ID NO: 9119 - DNA, 1095 bp, synthetic construct
  source 1..1095: mol_type = other DNA
atggccttaccagtgaccgccttgctcctgccgctggccttgctgctccacgccgccaggccggaggtgcagctggttgaatctggcggaggactggttcagcctggcggatctctgagactgtcttgtgccgccagcggcatcatcttcagcaattgtggcctggcctggtacagacaggcccctggcaaagagagagagctggtttccagcatcagcagacggggcaccaccatctacgccgactctgtgaaaggcagagccaccatcagccgggacaacagcaagaacaccctgtacctgcagatgaacagcctgagagccgaggacacagccgtgtacagctgcacaacagagcctcagctgggactgtgcgccagagattggggacagggaacactggtcaccgtgtctagtacgcgtaccacgacgccagcgccgcgaccaccaacaccggcgcccaccatcgcgtcgcagcccctgtccctgcgcccagaggcgtgccggccagcggcggggggcgcagtgcacacgagggggctggacttcgcctgtgacatctacatctgggcgcccttggccgggacttgtggggtccttctcctgtcactggttatcaccctttactgcaaacggggcagaaagaaactcctgtatatattcaaacaaccatttatgagaccagtacaaactactcaagaggaagatggctgtagctgccgatttccagaagaagaagaaggaggatgtgaactgagagtgaagttcagcaggagcgcagacgcccccgcgtaccagcagggccagaaccagctctataacgagctgaatctaggacgaagagaggagtacgatgttttggacaagagacgtggccgggaccctgagatggggggaaagccgagaaggaagaaccctcaggaaggcctgtacaatgaactgcagaaagataagatggcggaggcctacagtgagattgggatgaaaggcgagcgccggaggggcaaggggcacgatggcctttaccagggtctcagtacagccaccaaggacacctacgacgcccttcacatgcaggccctgccccctcgctaa

SEQ ID NO: 9120 - DNA, 1113 bp, synthetic construct
  source 1..1113: mol_type = other DNA
atggccttaccagtgaccgccttgctcctgccgctggccttgctgctccacgccgccaggccggaggtgcagctggttgaatctggcggaggactggttcagcctggcggatctctgagactgtcttgtgccgccagcggcagcatctttagcctgtctgccatgggctggtacagacaggcccctggcaatggcctggaactggtgtccgccatcagcaccaatggcgagagcacacagtacgccgacagcgtgaagggcagattcaccatcagccgggacaacagcaagaacaccctgtacctgcagatgaacagcctgagagccgaggacaccgccgtgtactactgtatcgccgctcctagcttcgtggtggctctgatccccagcagaatcagatcttggggccagggcaccatggtcaccgtttcttctacgcgtaccacgacgccagcgccgcgaccaccaacaccggcgcccaccatcgcgtcgcagcccctgtccctgcgcccagaggcgtgccggccagcggcggggggcgcagtgcacacgagggggctggacttcgcctgtgacatctacatctgggcgcccttggccgggacttgtggggtccttctcctgtcactggttatcaccctttactgcaaacggggcagaaagaaactcctgtatatattcaaacaaccatttatgagaccagtacaaactactcaagaggaagatggctgtagctgccgatttccagaagaagaagaaggaggatgtgaactgagagtgaagttcagcaggagcgcagacgcccccgcgtaccagcagggccagaaccagctctataacgagctgaatctaggacgaagagaggagtacgatgttttggacaagagacgtggccgggaccctgagatggggggaaagccgagaaggaagaaccctcaggaaggcctgtacaatgaactgcagaaagataagatggcggaggcctacagtgagattgggatgaaaggcgagcgccggaggggcaaggggcacgatggcctttaccagggtctcagtacagccaccaaggacacctacgacgcccttcacatgcaggccctgccccctcgctaa

SEQ ID NO: 9121 - DNA, 1113 bp, synthetic construct
  source 1..1113: mol_type = other DNA
atggccttaccagtgaccgccttgctcctgccgctggccttgctgctccacgccgccaggccggaggtgcagctggttgaatctggcggaggactggttcagcctggcggatctctgagactgtcttgtgccgccagcggcagcatctttagcctgtctgctatgggctggtacagacaggcccctggcaatggcctggaactggtgtctgccatcagcaccaatggcgacagcacccagtacgccgatagcgtgaagggcagattcaccatcagccgggacaacagcaagaacaccctgtacctccagatgaacagcctgagagccgaggacaccgccgtgtactactgtatcgccgctcctagcttcgtggtggctctgatccccagcagaatcagaagctggggccagggcacaatggtcaccgtttcttctacgcgtaccacgacgccagcgccgcgaccaccaacaccggcgcccaccatcgcgtcgcagcccctgtccctgcgcccagaggcgtgccggccagcggcggggggcgcagtgcacacgagggggctggacttcgcctgtgacatctacatctgggcgcccttggccgggacttgtggggtccttctcctgtcactggttatcaccctttactgcaaacggggcagaaagaaactcctgtatatattcaaacaaccatttatgagaccagtacaaactactcaagaggaagatggctgtagctgccgatttccagaagaagaagaaggaggatgtgaactgagagtgaagttcagcaggagcgcagacgcccccgcgtaccagcagggccagaaccagctctataacgagctgaatctaggacgaagagaggagtacgatgttttggacaagagacgtggccgggaccctgagatggggggaaagccgagaaggaagaaccctcaggaaggcctgtacaatgaactgcagaaagataagatggcggaggcctacagtgagattgggatgaaaggcgagcgccggaggggcaaggggcacgatggcctttaccagggtctcagtacagccaccaaggacacctacgacgcccttcacatgcaggccctgccccctcgctaa

SEQ ID NO: 9122 - DNA, 1842 bp, synthetic construct
  source 1..1842: mol_type = other DNA
atggccctgcctgtgacagctctgctgctgcctctggcactgctgctgcacgccgccagacctcaagtgaagctggtggaatctggcggcggatctgttcaggctggcggatctctgagactgagctgtgtggccagcggctacgcctactctccttactgcatggcctggttcagacaggcccctggcaaagagagagagggcgtcgcctctatctataccggaaacggcgccacctactatcccgactctgtgaagggcagattcaccatcagccaggacaaggccaaggacaccctgtacctgcagatgaacagcctgaagcctgaggacaccgccatgtactattgcgccgctgcctacgacctgagaagctgtggcggcacctggtacagattcagacactggggccagggcacccaagtgacagtctcttctacgcgtggaggcagtggtgtcttcacactcgaagatttcgttggggactggcgacagacagccggctacaacctggaccaagtccttgaacagggaggtgtgtccagtttgtttcagaatctcggggtgtccgtaactccgatccaaaggattgtcctgagcggtgaaaatgggctgaagatcgacatccatgtcatcatcccgtatgaaggtctgagcggcgaccaaatgggccagatcgaaaaaatttttaaggtggtgtaccctgtggatgatcatcactttaaggtgatcctgcactatggcacactggtaatcgacggggttacgccgaacatgatcgactatttcggacggccctatgaaggcatcgccgtgttcgacggcaaaaagatcactgtaacagggaccctgtggaacggcaacaaaattatcgacgagcgcctgatcaaccccgacggctccctgctgttccgagtaaccatcaacggagtgaccggctggcggctgtgcgaacgcattctggcgctcgagggaggcagctggagccaccctcagtttgaaaaagactacaaagacgatgacgataagggatcagattacaaggatgatgatgacaaggggtcagattataaagacgacgatgataaagggagcgactacaaggacgacgatgacaaggcctggtcccatccccagttcgagaaacaccatcaccaccaccatcatcacactagtggctccggcgagggcagaggaagtctactaacctgcggagatgtggaagaaaatcctggcccacatatgaccgagtacaagcccacggtgcgcctcgccacccgcgacgacgtccccagggccgtacgcaccctcgccgccgcgttcgccgactaccccgccacgcgccacaccgtcgatccggaccgccacatcgagcgggtcaccgagctgcaagaactcttcctcacgcgcgtcgggctcgacatcggcaaggtgtgggtcgcggacgacggcgccgcggtggcggtctggaccacgccggagagcgtcgaagcgggggcggtgttcgccgagatcggcccgcgcatggccgagttgagcggttcccggctggccgcgcagcaacagatggaaggcctcctggcgccgcaccggcccaaggagcccgcgtggttcctggccaccgtcggcgtctcgcccgaccaccagggcaagggtctgggcagcgccgtcgtgctccccggagtggaggcggccgagcgcgccggggtgcccgccttcctggagacctccgcgccccgcaacctccccttctacgagcggctcggcttcaccgtcaccgccgacgtcgaggtgcccgaaggaccgcgcacctggtgcatgacccgcaagcccggtgcctga

SEQ ID NO: 9123 - DNA, 1839 bp, synthetic construct
  source 1..1839: mol_type = other DNA
atggccttaccagtgaccgccttgctcctgccgctggccttgctgctccacgccgccaggccggaggtgcagctggttgaatctggcggaggactggttcagcctggcggatctctgagactgtcttgtgccgccagcggcagcatctttagcctgtctgccatgggctggtacagacaggcccctggcaatggcctggaactggtgtccgccatcagcaccaatggcgagagcacacagtacgccgacagcgtgaagggcagattcaccatcagccgggacaacagcaagaacaccctgtacctgcagatgaacagcctgagagccgaggacaccgccgtgtactactgtatcgccgctcctagcttcgtggtggctctgatccccagcagaatcagatcttggggccagggcaccatggtcaccgtttcttctacgcgtggaggcagtggtgtcttcacactcgaagatttcgttggggactggcgacagacagccggctacaacctggaccaagtccttgaacagggaggtgtgtccagtttgtttcagaatctcggggtgtccgtaactccgatccaaaggattgtcctgagcggtgaaaatgggctgaagatcgacatccatgtcatcatcccgtatgaaggtctgagcggcgaccaaatgggccagatcgaaaaaatttttaaggtggtgtaccctgtggatgatcatcactttaaggtgatcctgcactatggcacactggtaatcgacggggttacgccgaacatgatcgactatttcggacggccctatgaaggcatcgccgtgttcgacggcaaaaagatcactgtaacagggaccctgtggaacggcaacaaaattatcgacgagcgcctgatcaaccccgacggctccctgctgttccgagtaaccatcaacggagtgaccggctggcggctgtgcgaacgcattctggcgctcgagggaggcagctggagccaccctcagtttgaaaaagactacaaagacgatgacgataagggatcagattacaaggatgatgatgacaaggggtcagattataaagacgacgatgataaagggagcgactacaaggacgacgatgacaaggcctggtcccatccccagttcgagaaacaccatcaccaccaccatcatcacactagtggctccggcgagggcagaggaagtctactaacctgcggagatgtggaagaaaatcctggcccacatatgaccgagtacaagcccacggtgcgcctcgccacccgcgacgacgtccccagggccgtacgcaccctcgccgccgcgttcgccgactaccccgccacgcgccacaccgtcgatccggaccgccacatcgagcgggtcaccgagctgcaagaactcttcctcacgcgcgtcgggctcgacatcggcaaggtgtgggtcgcggacgacggcgccgcggtggcggtctggaccacgccggagagcgtcgaagcgggggcggtgttcgccgagatcggcccgcgcatggccgagttgagcggttcccggctggccgcgcagcaacagatggaaggcctcctggcgccgcaccggcccaaggagcccgcgtggttcctggccaccgtcggcgtctcgcccgaccaccagggcaagggtctgggcagcgccgtcgtgctccccggagtggaggcggccgagcgcgccggggtgcccgccttcctggagacctccgcgccccgcaacctccccttctacgagcggctcggcttcaccgtcaccgccgacgtcgaggtgcccgaaggaccgcgcacctggtgcatgacccgcaagcccggtgcctga

SEQ ID NO: 9124 - DNA, 1461 bp, synthetic construct
  source 1..1461: mol_type = other DNA
atggccttaccagtgaccgccttgctcctgccgctggccttgctgctccacgccgccaggccggctcaggtgctgacacagacacctagctctgtgtctgccgccgttggcggcacagtgaccattaactgtcaggccagccagagcgtgtacaagaacaactacctgagctggtatcagcagaagcccggccagcctcctagactgctgatctacgatgccagcacactggccagcggagtgcccagtagattcaaaggctctggcagcggcacccagttcaccctgacaatttctggcgtgcagtgcgacgatgccgccacctattattgcctgggcgagttcagctgtagcagcggagattgtgccgcctttggaggcggaacagaggtggtggtcaaaggaggcggtggatctggcggcggaggtagtggtggtggcggatctcagtctgtggaagaaagcggaggcagactggtcacccctggcacacctctgacactgacctgtaccgtgtccggcatcgacctgagcagctacgccatgacatgggtccgacaagctccaggcgaaggactggaatggatcggcaccatcaacaccatcagcaccgcctactatgccaactgggccaagggcagattcaccatctccaagaccagcaccaccgtggacctgaagatcgcctctcctaccaccgaggacaccgccacatacttttgcgccagagatcacggctactacgacgtgtggggacagggcacactcgtgacagtctcttctacgcgtaccacgacgccagcgccgcgaccaccaacaccggcgcccaccatcgcgtcgcagcccctgtccctgcgcccagaggcgtgccggccagcggcggggggcgcagtgcacacgagggggctggacttcgcctgtgacatctacatctgggcgcccttggccgggacttgtggggtccttctcctgtcactggttatcaccctttactgcaaacggggcagaaagaaactcctgtatatattcaaacaaccatttatgagaccagtacaaactactcaagaggaagatggctgtagctgccgatttccagaagaagaagaaggaggatgtgaactgagagtgaagttcagcaggagcgcagacgcccccgcgtaccagcagggccagaaccagctctataacgagctgaatctaggacgaagagaggagtacgatgttttggacaagagacgtggccgggaccctgagatggggggaaagccgagaaggaagaaccctcaggaaggcctgtacaatgaactgcagaaagataagatggcggaggcctacagtgagattgggatgaaaggcgagcgccggaggggcaaggggcacgatggcctttaccagggtctcagtacagccaccaaggacacctacgacgcccttcacatgcaggccctgccccctcgctaa

SEQ ID NO: 9125 - DNA, 1461 bp, synthetic construct
  source 1..1461: mol_type = other DNA
atggccttaccagtgaccgccttgctcctgccgctggccttgctgctccacgccgccaggccggctcaggtgctgacacagacacctagctctgtgtctgccgccgttggcggcacagtgaccattaactgtcaggccagccagagcgtgtacaacaacaactacctgagctggtatcagcagaagcccggccagcctcctagactgctgatctacgatgccagcacactggccagcggagtgcccagtagattcaaaggctctggcagcggcacccagttcaccctgacaatttctggcgtgcagtgcgacgatgccgccacctattattgcctgggcgagttcagctgtagcagcggagattgtgccgcctttggaggcggaacagaggtggtggtcaaaggaggcggtggatctggcggcggaggtagtggtggtggcggatctcagtctgtggaagaaagcggaggcagactggtcacccctggcacacctctgacactgacctgtaccgtgtccggcatcgacctgagcgcctacgccatgacatgggtccgacaagctccaggcgaaggactggaatggatcggcaccatcaacaccatcagcaccgcctactatgccaactgggccaagggcagattcaccatctccaagaccagcaccaccgtggacctgaagatcgcctctcctaccaccgaggacaccgccacatacttttgcgccagagatcacggctactacgacgtgtggggacagggcacactcgtgacagtctcttctacgcgtaccacgacgccagcgccgcgaccaccaacaccggcgcccaccatcgcgtcgcagcccctgtccctgcgcccagaggcgtgccggccagcggcggggggcgcagtgcacacgagggggctggacttcgcctgtgacatctacatctgggcgcccttggccgggacttgtggggtccttctcctgtcactggttatcaccctttactgcaaacggggcagaaagaaactcctgtatatattcaaacaaccatttatgagaccagtacaaactactcaagaggaagatggctgtagctgccgatttccagaagaagaagaaggaggatgtgaactgagagtgaagttcagcaggagcgcagacgcccccgcgtaccagcagggccagaaccagctctataacgagctgaatctaggacgaagagaggagtacgatgttttggacaagagacgtggccgggaccctgagatggggggaaagccgagaaggaagaaccctcaggaaggcctgtacaatgaactgcagaaagataagatggcggaggcctacagtgagattgggatgaaaggcgagcgccggaggggcaaggggcacgatggcctttaccagggtctcagtacagccaccaaggacacctacgacgcccttcacatgcaggccctgccccctcgctaa

SEQ ID NO: 9126 - DNA, 1461 bp, synthetic construct
  source 1..1461: mol_type = other DNA
atggccttaccagtgaccgccttgctcctgccgctggccttgctgctccacgccgccaggccggctcaggtgctgacacagacacctagctctgtgtctgccgccgttggcggcacagtgaccattaactgtcaggccagccagagcgtgtacaagaacaactacctgagctggtatcagcagaagcccggccagcctcctagactgctgatctacgatgccagcacactggccagcggagtgcccagtagattcaaaggctctggcagcggcacccagttcaccctgacaatttctggcgtgcagtgcgacgatgccgccacctattattgccagggcgagttcagctgtagcagcggagattgtgccgcctttggaggcggaacagaggtggtggtcaaaggaggcggtggatctggcggcggaggtagtggtggtggcggatctcagtctgtggaagaaagcggaggcagactggtcacccctggcacacctctgacactgacctgtaccgtgtccggcatcgacctgagcgcctacgccatgacatgggtccgacaagctccaggcgaaggactggaatggatcggcaccatcaacaccatcagcaccgcctactatgccaactgggccaagggcagattcaccatctccaagaccagcaccaccgtggacctgaagatcgcctctcctaccaccgaggacaccgccacatacttttgcgccagagatcacggctactacgacctctggggacagggcacactcgtgacagtctcttctacgcgtaccacgacgccagcgccgcgaccaccaacaccggcgcccaccatcgcgtcgcagcccctgtccctgcgcccagaggcgtgccggccagcggcggggggcgcagtgcacacgagggggctggacttcgcctgtgacatctacatctgggcgcccttggccgggacttgtggggtccttctcctgtcactggttatcaccctttactgcaaacggggcagaaagaaactcctgtatatattcaaacaaccatttatgagaccagtacaaactactcaagaggaagatggctgtagctgccgatttccagaagaagaagaaggaggatgtgaactgagagtgaagttcagcaggagcgcagacgcccccgcgtaccagcagggccagaaccagctctataacgagctgaatctaggacgaagagaggagtacgatgttttggacaagagacgtggccgggaccctgagatggggggaaagccgagaaggaagaaccctcaggaaggcctgtacaatgaactgcagaaagataagatggcggaggcctacagtgagattgggatgaaaggcgagcgccggaggggcaaggggcacgatggcctttaccagggtctcagtacagccaccaaggacacctacgacgcccttcacatgcaggccctgccccctcgctaa

SEQ ID NO: 9127 - DNA, 1461 bp, synthetic construct
  source 1..1461: mol_type = other DNA
atggccttaccagtgaccgccttgctcctgccgctggccttgctgctccacgccgccaggccggctcaggtgctgacacagacacctagctctgtgtctgccgccgttggcggcacagtgaccattaactgtcaggccagccagagcgtgtacaagaacaactacctgagctggtatcagcagaagcccggccagcctcctagactgctgatctacgatgccagcacactggccagcggagtgcccagtagattcaaaggctctggcagcggcacccagttcaccctgacaatttctggcgtgcagtgcgacgatgccgccacctattattgcctgggcgagttcagctgtagcagcggagattgtgccgcctttggaggcggaacagaggtggtggtcaaaggaggcggtggatctggcgtcggaggtagtggtggtggcggatctcagtctgtggaagaaagcggaggcagactggtcacccctggcacacctctgacactgacctgtaccgtgtccggcatcgacctgagcagctacgccatgacatgggtccgacaagctccaggcgaaggactggaatggatcggcaccatcaacaccatcagcaccgcctactatgccaactgggccaagggcagattcaccatctccaagaccagcaccaccgtggacctgaagatcgcctctcctaccaccgaggacaccgccacatacttttgcgccagagatcacggctactacgacgtgtggggacagggcacactcgtgacagtctcttctacgcgtaccacgacgccagcgccgcgaccaccaacaccggcgcccaccatcgcgtcgcagcccctgtccctgcgcccagaggcgtgccggccagcggcggggggcgcagtgcacacgagggggctggacttcgcctgtgacatctacatctgggcgcccttggccgggacttgtggggtccttctcctgtcactggttatcaccctttactgcaaacggggcagaaagaaactcctgtatatattcaaacaaccatttatgagaccagtacaaactactcaagaggaagatggctgtagctgccgatttccagaagaagaagaaggaggatgtgaactgagagtgaagttcagcaggagcgcagacgcccccgcgtaccagcagggccagaaccagctctataacgagctgaatctaggacgaagagaggagtacgatgttttggacaagagacgtggccgggaccctgagatggggggaaagccgagaaggaagaaccctcaggaaggcctgtacaatgaactgcagaaagataagatggcggaggcctacagtgagattgggatgaaaggcgagcgccggaggggcaaggggcacgatggcctttaccagggtctcagtacagccaccaaggacacctacgacgcccttcacatgcaggccctgccccctcgctaa

SEQ ID NO: 9128 - DNA, 1461 bp, synthetic construct
  source 1..1461: mol_type = other DNA
atggccttaccagtgaccgccttgctcctgccgctggccttgctgctccacgccgccaggccggctcaggtgctgacacagacacctagctctgtgtctgccgccgttggcggcacagtgaccattaactgtcaggccagccagagcgtgtacaagaacaactacctgagctggtatcagcagaagcccggccagcctcctagactgctgatctacgatgccagcacactggccagcggagtgcccagtagattcaaaggctctggcagcggcacccagttcaccctgacaatttctggcgtgcagtgcgacgatgccgccacctattattgcctgggcgagttcagctgtagcagcggagattgtagcgcctttggaggcggaacagaggtggtggtcaaaggaggcggtggatctggcggcggaggtagtggtggtggcggatctcagtctgtggaagaaagcggaggcagactggtcacccctggcacacctctgacactgacctgtaccgtgtccggcatcgacctgagcagctacgccatgacatgggtccgacaagctccaggcgaaggactggaatggatcggcaccatcaacaccatcagcaccgcctactatgccaactgggccaagggcagattcaccatctccaagaccagcaccaccgtggacctgaagatcgcctctcctaccaccgaggacaccgccacatacttttgcgccagagatcacggctactacgacctctggggacagggcacactcgtgacagtctcttctacgcgtaccacgacgccagcgccgcgaccaccaacaccggcgcccaccatcgcgtcgcagcccctgtccctgcgcccagaggcgtgccggccagcggcggggggcgcagtgcacacgagggggctggacttcgcctgtgacatctacatctgggcgcccttggccgggacttgtggggtccttctcctgtcactggttatcaccctttactgcaaacggggcagaaagaaactcctgtatatattcaaacaaccatttatgagaccagtacaaactactcaagaggaagatggctgtagctgccgatttccagaagaagaagaaggaggatgtgaactgagagtgaagttcagcaggagcgcagacgcccccgcgtaccagcagggccagaaccagctctataacgagctgaatctaggacgaagagaggagtacgatgttttggacaagagacgtggccgggaccctgagatggggggaaagccgagaaggaagaaccctcaggaaggcctgtacaatgaactgcagaaagataagatggcggaggcctacagtgagattgggatgaaaggcgagcgccggaggggcaaggggcacgatggcctttaccagggtctcagtacagccaccaaggacacctacgacgcccttcacatgcaggccctgccccctcgctaa

SEQ ID NO: 9129 - DNA, 1461 bp, synthetic construct
  source 1..1461: mol_type = other DNA
atggccttaccagtgaccgccttgctcctgccgctggccttgctgctccacgccgccaggccggctcaggtgctgacacagacacctagctctgtgtctgccgccgttggcggcacagtgaccattaactgtcaggccagccagagcgtgtacaacaacaactacctgagctggtatcagcagaagcccggccagcctcctagactgctgatctacgatgccagcacactggccagcggagtgcccagtagattcaaaggctctggcagcggcacccagttcaccctgacaatttctggcgtgcagtgcgacgatgccgccacctattattgccagggcgagttcagctgtagcagcggagattgtagcgcctttggaggcggaacagaggtggtggtcaaaggaggcggtggatctggcggcggaggtagtggtggtggcggatctcagtctgtggaagaaagcggaggcagactggtcacccctggcacacctctgacactgacctgtaccgtgtccggcatcgacctgagcagctacgccatgacatgggtccgacaagctccaggcgaaggactggaatggatcggcaccatcaacaccatcagcaccgcctactatgccaactgggccaagggcagattcaccatctccaagaccagcaccaccgtggacctgaagatcgcctctcctaccaccgaggacaccgccacatacttttgcgccagagaacacggctactacgacgtgtggggacagggcacactcgtgacagtctcttctacgcgtaccacgacgccagcgccgcgaccaccaacaccggcgcccaccatcgcgtcgcagcccctgtccctgcgcccagaggcgtgccggccagcggcggggggcgcagtgcacacgagggggctggacttcgcctgtgacatctacatctgggcgcccttggccgggacttgtggggtccttctcctgtcactggttatcaccctttactgcaaacggggcagaaagaaactcctgtatatattcaaacaaccatttatgagaccagtacaaactactcaagaggaagatggctgtagctgccgatttccagaagaagaagaaggaggatgtgaactgagagtgaagttcagcaggagcgcagacgcccccgcgtaccagcagggccagaaccagctctataacgagctgaatctaggacgaagagaggagtacgatgttttggacaagagacgtggccgggaccctgagatggggggaaagccgagaaggaagaaccctcaggaaggcctgtacaatgaactgcagaaagataagatggcggaggcctacagtgagattgggatgaaaggcgagcgccggaggggcaaggggcacgatggcctttaccagggtctcagtacagccaccaaggacacctacgacgcccttcacatgcaggccctgccccctcgctaa

SEQ ID NO: 9130 - DNA, 2187 bp, synthetic construct
  source 1..2187: mol_type = other DNA
atggccttaccagtgaccgccttgctcctgccgctggccttgctgctccacgccgccaggccggctcaggtgctgacacagacacctagctctgtgtctgccgccgttggcggcacagtgaccattaactgtcaggccagccagagcgtgtacaacaacaactacctgagctggtatcagcagaagcccggccagcctcctagactgctgatctacgatgccagcacactggccagcggagtgcccagtagattcaaaggctctggcagcggcacccagttcaccctgacaatttctggcgtgcagtgcgacgatgccgccacctattattgcctgggcgagttcagctgtagcagcggagattgtgccgcctttggaggcggaacagaggtggtggtcaaaggaggcggtggatctggcggcggaggtagtggtggtggcggatctcagtctgtggaagaaagcggaggcagactggtcacccctggcacacctctgacactgacctgtaccgtgtccggcatcgacctgagcgcctacgccatgacatgggtccgacaagctccaggcgaaggactggaatggatcggcaccatcaacaccatcagcaccgcctactatgccaactgggccaagggcagattcaccatctccaagaccagcaccaccgtggacctgaagatcgcctctcctaccaccgaggacaccgccacatacttttgcgccagagatcacggctactacgacgtgtggggacagggcacactcgtgacagtctcttctacgcgtggaggcagtggtgtcttcacactcgaagatttcgttggggactggcgacagacagccggctacaacctggaccaagtccttgaacagggaggtgtgtccagtttgtttcagaatctcggggtgtccgtaactccgatccaaaggattgtcctgagcggtgaaaatgggctgaagatcgacatccatgtcatcatcccgtatgaaggtctgagcggcgaccaaatgggccagatcgaaaaaatttttaaggtggtgtaccctgtggatgatcatcactttaaggtgatcctgcactatggcacactggtaatcgacggggttacgccgaacatgatcgactatttcggacggccctatgaaggcatcgccgtgttcgacggcaaaaagatcactgtaacagggaccctgtggaacggcaacaaaattatcgacgagcgcctgatcaaccccgacggctccctgctgttccgagtaaccatcaacggagtgaccggctggcggctgtgcgaacgcattctggcgctcgagggaggcagctggagccaccctcagtttgaaaaagactacaaagacgatgacgataagggatcagattacaaggatgatgatgacaaggggtcagattataaagacgacgatgataaagggagcgactacaaggacgacgatgacaaggcctggtcccatccccagttcgagaaacaccatcaccaccaccatcatcacactagtggctccggcgagggcagaggaagtctactaacctgcggagatgtggaagaaaatcctggcccacatatgaccgagtacaagcccacggtgcgcctcgccacccgcgacgacgtccccagggccgtacgcaccctcgccgccgcgttcgccgactaccccgccacgcgccacaccgtcgatccggaccgccacatcgagcgggtcaccgagctgcaagaactcttcctcacgcgcgtcgggctcgacatcggcaaggtgtgggtcgcggacgacggcgccgcggtggcggtctggaccacgccggagagcgtcgaagcgggggcggtgttcgccgagatcggcccgcgcatggccgagttgagcggttcccggctggccgcgcagcaacagatggaaggcctcctggcgccgcaccggcccaaggagcccgcgtggttcctggccaccgtcggcgtctcgcccgaccaccagggcaagggtctgggcagcgccgtcgtgctccccggagtggaggcggccgagcgcgccggggtgcccgccttcctggagacctccgcgccccgcaacctccccttctacgagcggctcggcttcaccgtcaccgccgacgtcgaggtgcccgaaggaccgcgcacctggtgcatgacccgcaagcccggtgcctga

SEQ ID NO: 9131 - DNA, 2187 bp, synthetic construct
  source 1..2187: mol_type = other DNA
atggccttaccagtgaccgccttgctcctgccgctggccttgctgctccacgccgccaggccggctcaggtgctgacacagacacctagctctgtgtctgccgccgttggcggcacagtgaccattaactgtcaggccagccagagcgtgtacaagaacaactacctgagctggtatcagcagaagcccggccagcctcctagactgctgatctacgatgccagcacactggccagcggagtgcccagtagattcaaaggctctggcagcggcacccagttcaccctgacaatttctggcgtgcagtgcgacgatgccgccacctattattgccagggcgagttcagctgtagcagcggagattgtgccgcctttggaggcggaacagaggtggtggtcaaaggaggcggtggatctggcggcggaggtagtggtggtggcggatctcagtctgtggaagaaagcggaggcagactggtcacccctggcacacctctgacactgacctgtaccgtgtccggcatcgacctgagcgcctacgccatgacatgggtccgacaagctccaggcgaaggactggaatggatcggcaccatcaacaccatcagcaccgcctactatgccaactgggccaagggcagattcaccatctccaagaccagcaccaccgtggacctgaagatcgcctctcctaccaccgaggacaccgccacatacttttgcgccagagatcacggctactacgacctctggggacagggcacactcgtgacagtctcttctacgcgtggaggcagtggtgtcttcacactcgaagatttcgttggggactggcgacagacagccggctacaacctggaccaagtccttgaacagggaggtgtgtccagtttgtttcagaatctcggggtgtccgtaactccgatccaaaggattgtcctgagcggtgaaaatgggctgaagatcgacatccatgtcatcatcccgtatgaaggtctgagcggcgaccaaatgggccagatcgaaaaaatttttaaggtggtgtaccctgtggatgatcatcactttaaggtgatcctgcactatggcacactggtaatcgacggggttacgccgaacatgatcgactatttcggacggccctatgaaggcatcgccgtgttcgacggcaaaaagatcactgtaacagggaccctgtggaacggcaacaaaattatcgacgagcgcctgatcaaccccgacggctccctgctgttccgagtaaccatcaacggagtgaccggctggcggctgtgcgaacgcattctggcgctcgagggaggcagctggagccaccctcagtttgaaaaagactacaaagacgatgacgataagggatcagattacaaggatgatgatgacaaggggtcagattataaagacgacgatgataaagggagcgactacaaggacgacgatgacaaggcctggtcccatccccagttcgagaaacaccatcaccaccaccatcatcacactagtggctccggcgagggcagaggaagtctactaacctgcggagatgtggaagaaaatcctggcccacatatgaccgagtacaagcccacggtgcgcctcgccacccgcgacgacgtccccagggccgtacgcaccctcgccgccgcgttcgccgactaccccgccacgcgccacaccgtcgatccggaccgccacatcgagcgggtcaccgagctgcaagaactcttcctcacgcgcgtcgggctcgacatcggcaaggtgtgggtcgcggacgacggcgccgcggtggcggtctggaccacgccggagagcgtcgaagcgggggcggtgttcgccgagatcggcccgcgcatggccgagttgagcggttcccggctggccgcgcagcaacagatggaaggcctcctggcgccgcaccggcccaaggagcccgcgtggttcctggccaccgtcggcgtctcgcccgaccaccagggcaagggtctgggcagcgccgtcgtgctccccggagtggaggcggccgagcgcgccggggtgcccgccttcctggagacctccgcgccccgcaacctccccttctacgagcggctcggcttcaccgtcaccgccgacgtcgaggtgcccgaaggaccgcgcacctggtgcatgacccgcaagcccggtgcctga

SEQ ID NO: 9132 - DNA, 2187 bp, synthetic construct
  source 1..2187: mol_type = other DNA
atggccttaccagtgaccgccttgctcctgccgctggccttgctgctccacgccgccaggccggctcaggtgctgacacagacacctagctctgtgtctgccgccgttggcggcacagtgaccattaactgtcaggccagccagagcgtgtacaacaacaactacctgagctggtatcagcagaagcccggccagcctcctagactgctgatctacgatgccagcacactggccagcggagtgcccagtagattcaaaggctctggcagcggcacccagttcaccctgacaatttctggcgtgcagtgcgacgatgccgccacctattattgccagggcgagttcagctgtagcagcggagattgtagcgcctttggaggcggaacagaggtggtggtcaaaggaggcggtggatctggcggcggaggtagtggtggtggcggatctcagtctgtggaagaaagcggaggcagactggtcacccctggcacacctctgacactgacctgtaccgtgtccggcatcgacctgagcagctacgccatgacatgggtccgacaagctccaggcgaaggactggaatggatcggcaccatcaacaccatcagcaccgcctactatgccaactgggccaagggcagattcaccatctccaagaccagcaccaccgtggacctgaagatcgcctctcctaccaccgaggacaccgccacatacttttgcgccagagaacacggctactacgacgtgtggggacagggcacactcgtgacagtctcttctacgcgtggaggcagtggtgtcttcacactcgaagatttcgttggggactggcgacagacagccggctacaacctggaccaagtccttgaacagggaggtgtgtccagtttgtttcagaatctcggggtgtccgtaactccgatccaaaggattgtcctgagcggtgaaaatgggctgaagatcgacatccatgtcatcatcccgtatgaaggtctgagcggcgaccaaatgggccagatcgaaaaaatttttaaggtggtgtaccctgtggatgatcatcactttaaggtgatcctgcactatggcacactggtaatcgacggggttacgccgaacatgatcgactatttcggacggccctatgaaggcatcgccgtgttcgacggcaaaaagatcactgtaacagggaccctgtggaacggcaacaaaattatcgacgagcgcctgatcaaccccgacggctccctgctgttccgagtaaccatcaacggagtgaccggctggcggctgtgcgaacgcattctggcgctcgagggaggcagctggagccaccctcagtttgaaaaagactacaaagacgatgacgataagggatcagattacaaggatgatgatgacaaggggtcagattataaagacgacgatgataaagggagcgactacaaggacgacgatgacaaggcctggtcccatccccagttcgagaaacaccatcaccaccaccatcatcacactagtggctccggcgagggcagaggaagtctactaacctgcggagatgtggaagaaaatcctggcccacatatgaccgagtacaagcccacggtgcgcctcgccacccgcgacgacgtccccagggccgtacgcaccctcgccgccgcgttcgccgactaccccgccacgcgccacaccgtcgatccggaccgccacatcgagcgggtcaccgagctgcaagaactcttcctcacgcgcgtcgggctcgacatcggcaaggtgtgggtcgcggacgacggcgccgcggtggcggtctggaccacgccggagagcgtcgaagcgggggcggtgttcgccgagatcggcccgcgcatggccgagttgagcggttcccggctggccgcgcagcaacagatggaaggcctcctggcgccgcaccggcccaaggagcccgcgtggttcctggccaccgtcggcgtctcgcccgaccaccagggcaagggtctgggcagcgccgtcgtgctccccggagtggaggcggccgagcgcgccggggtgcccgccttcctggagacctccgcgccccgcaacctccccttctacgagcggctcggcttcaccgtcaccgccgacgtcgaggtgcccgaaggaccgcgcacctggtgcatgacccgcaagcccggtgcctga

SEQ ID NO: 9133 - DNA, 2187 bp, synthetic construct
  source 1..2187: mol_type = other DNA
atggccttaccagtgaccgccttgctcctgccgctggccttgctgctccacgccgccaggccggctcaggtgctgacacagacacctagctctgtgtctgccgccgttggcggcacagtgaccattaactgtcaggccagccagagcgtgtacaagaacaactacctgagctggtatcagcagaagcccggccagcctcctagactgctgatctacgatgccagcacactggccagcggagtgcccagtagattcaaaggctctggcagcggcacccagttcaccctgacaatttctggcgtgcagtgcgacgatgccgccacctattattgcctgggcgagttcagctgtagcagcggagattgtagcgcctttggaggcggaacagaggtggtggtcaaaggaggcggtggatctggcggcggaggtagtggtggtggcggatctcagtctgtggaagaaagcggaggcagactggtcacccctggcacacctctgacactgacctgtaccgtgtccggcatcgacctgagcagctacgccatgacatgggtccgacaagctccaggcgaaggactggaatggatcggcaccatcaacaccatcagcaccgcctactatgccaactgggccaagggcagattcaccatctccaagaccagcaccaccgtggacctgaagatcgcctctcctaccaccgaggacaccgccacatacttttgcgccagagatcacggctactacgacctctggggacagggcacactcgtgacagtctcttctacgcgtggaggcagtggtgtcttcacactcgaagatttcgttggggactggcgacagacagccggctacaacctggaccaagtccttgaacagggaggtgtgtccagtttgtttcagaatctcggggtgtccgtaactccgatccaaaggattgtcctgagcggtgaaaatgggctgaagatcgacatccatgtcatcatcccgtatgaaggtctgagcggcgaccaaatgggccagatcgaaaaaatttttaaggtggtgtaccctgtggatgatcatcactttaaggtgatcctgcactatggcacactggtaatcgacggggttacgccgaacatgatcgactatttcggacggccctatgaaggcatcgccgtgttcgacggcaaaaagatcactgtaacagggaccctgtggaacggcaacaaaattatcgacgagcgcctgatcaaccccgacggctccctgctgttccgagtaaccatcaacggagtgaccggctggcggctgtgcgaacgcattctggcgctcgagggaggcagctggagccaccctcagtttgaaaaagactacaaagacgatgacgataagggatcagattacaaggatgatgatgacaaggggtcagattataaagacgacgatgataaagggagcgactacaaggacgacgatgacaaggcctggtcccatccccagttcgagaaacaccatcaccaccaccatcatcacactagtggctccggcgagggcagaggaagtctactaacctgcggagatgtggaagaaaatcctggcccacatatgaccgagtacaagcccacggtgcgcctcgccacccgcgacgacgtccccagggccgtacgcaccctcgccgccgcgttcgccgactaccccgccacgcgccacaccgtcgatccggaccgccacatcgagcgggtcaccgagctgcaagaactcttcctcacgcgcgtcgggctcgacatcggcaaggtgtgggtcgcggacgacggcgccgcggtggcggtctggaccacgccggagagcgtcgaagcgggggcggtgttcgccgagatcggcccgcgcatggccgagttgagcggttcccggctggccgcgcagcaacagatggaaggcctcctggcgccgcaccggcccaaggagcccgcgtggttcctggccaccgtcggcgtctcgcccgaccaccagggcaagggtctgggcagcgccgtcgtgctccccggagtggaggcggccgagcgcgccggggtgcccgccttcctggagacctccgcgccccgcaacctccccttctacgagcggctcggcttcaccgtcaccgccgacgtcgaggtgcccgaaggaccgcgcacctggtgcatgacccgcaagcccggtgcctga

SEQ ID NO: 9134 - DNA, 1086 bp, synthetic construct
  source 1..1086: mol_type = other DNA
atggccttaccagtgaccgccttgctcctgccgctggccttgctgctccacgccgccaggccgcaggttcagctgcaagagtctggcggaggactggttcaagctggcggaagcctgagactgagctgtgttgcctctggcagcatccggtccatcaacgtgatgggctggtacagacaggcccctggcaaacagagagaactggttgccgcctgtgccagcgacggcaatacctactatgccgacagcgtgaagggcagattcaccatcagccgggacaacgccgagaaaaccgtgtacctccagatgaacaacctgaagcctgacgacaccgccgtgtactactgcgacgccaacagcaggggcaactactattctggccagggcacccaagtgaccgtgtctagtacgcgtaccacgacgccagcgccgcgaccaccaacaccggcgcccaccatcgcgtcgcagcccctgtccctgcgcccagaggcgtgccggccagcggcggggggcgcagtgcacacgagggggctggacttcgcctgtgacatctacatctgggcgcccttggccgggacttgtggggtccttctcctgtcactggttatcaccctttactgcaaacggggcagaaagaaactcctgtatatattcaaacaaccatttatgagaccagtacaaactactcaagaggaagatggctgtagctgccgatttccagaagaagaagaaggaggatgtgaactgagagtgaagttcagcaggagcgcagacgcccccgcgtaccagcagggccagaaccagctctataacgagctgaatctaggacgaagagaggagtacgatgttttggacaagagacgtggccgggaccctgagatggggggaaagccgagaaggaagaaccctcaggaaggcctgtacaatgaactgcagaaagataagatggcggaggcctacagtgagattgggatgaaaggcgagcgccggaggggcaaggggcacgatggcctttaccagggtctcagtacagccaccaaggacacctacgacgcccttcacatgcaggccctgccccctcgctaa

SEQ ID NO: 9135 - DNA, 1086 bp, synthetic construct
  source 1..1086: mol_type = other DNA
atggccttaccagtgaccgccttgctcctgccgctggccttgctgctccacgccgccaggccgcaggttcagctgcaagagtctggcggaggactggttcaagctggcggaagcctgagactgagctgtgttgcctctggcgacatccggtccatcaacgtgatgggctggtacagacaggcccctggcaaacagagagaactggttgccgcctgtgccagcgacggcaatacctactatgccgacagcgtgaagggcagattcaccatcagccgggacaacgccgagaaaaccgtgtacctccagatgaacaacctgaagcctgacgacaccgccgtgtactactgcgacgccaacagcaggggcaactactattctggccagggcacccaagtgaccgtgtctagtacgcgtaccacgacgccagcgccgcgaccaccaacaccggcgcccaccatcgcgtcgcagcccctgtccctgcgcccagaggcgtgccggccagcggcggggggcgcagtgcacacgagggggctggacttcgcctgtgacatctacatctgggcgcccttggccgggacttgtggggtccttctcctgtcactggttatcaccctttactgcaaacggggcagaaagaaactcctgtatatattcaaacaaccatttatgagaccagtacaaactactcaagaggaagatggctgtagctgccgatttccagaagaagaagaaggaggatgtgaactgagagtgaagttcagcaggagcgcagacgcccccgcgtaccagcagggccagaaccagctctataacgagctgaatctaggacgaagagaggagtacgatgttttggacaagagacgtggccgggaccctgagatggggggaaagccgagaaggaagaaccctcaggaaggcctgtacaatgaactgcagaaagataagatggcggaggcctacagtgagattgggatgaaaggcgagcgccggaggggcaaggggcacgatggcctttaccagggtctcagtacagccaccaaggacacctacgacgcccttcacatgcaggccctgccccctcgctaa

SEQ ID NO: 9136 - DNA, 1095 bp, synthetic construct
  source 1..1095: mol_type = other DNA
atggccctgcctgtgacagctctgctgctgcctctggcactgctgctgcacgccgccagacctcaggttcagctgcaagagtctggcggaggactggttcaagctggcggaagcctgagactgtcttgtgccgccagcggcagcatcttcggcatcaacgagatcaacctgatgggctggtacagacaggcccctggcaaacagagagaactggttgccgcctgtgccagcgacggcaatacctactatgccgacagcgtgaagggcagattcaccatcagccgggacaacgccgagaaaaccgtgtacctccagatgaacaacctgaagcctgacgacaccgccgtgtactactgcgacgccaacagcagaggcaactactactctggccagggcacccaagtgaccgtgtcatctacgcgtaccacgacgccagcgccgcgaccaccaacaccggcgcccaccatcgcgtcgcagcccctgtccctgcgcccagaggcgtgccggccagcggcggggggcgcagtgcacacgagggggctggacttcgcctgtgacatctacatctgggcgcccttggccgggacttgtggggtccttctcctgtcactggttatcaccctttactgcaaacggggcagaaagaaactcctgtatatattcaaacaaccatttatgagaccagtacaaactactcaagaggaagatggctgtagctgccgatttccagaagaagaagaaggaggatgtgaactgagagtgaagttcagcaggagcgcagacgcccccgcgtaccagcagggccagaaccagctctataacgagctgaatctaggacgaagagaggagtacgatgttttggacaagagacgtggccgggaccctgagatggggggaaagccgagaaggaagaaccctcaggaaggcctgtacaatgaactgcagaaagataagatggcggaggcctacagtgagattgggatgaaaggcgagcgccggaggggcaaggggcacgatggcctttaccagggtctcagtacagccaccaaggacacctacgacgcccttcacatgcaggccctgccccctcgctaa

SEQ ID NO: 9137 - DNA, 1095 bp, synthetic construct
  source 1..1095: mol_type = other DNA
atggccctgcctgtgacagctctgctgctgcctctggcactgctgctgcacgccgccagacctcaggttcagctgcaagagtctggcggaggactggttcaagctggcggaagcctgagactgtcttgtgccgccagcggcagcatcttcagcatcaacgagatcaacctgatgggctggtacagacaggcccctggcaaacagagagaactggttgccgcctgtgccagcgacggcaatacctactatgccgacagcgtgaagggcagattcaccatcagccgggacaacgccgagaaaaccgtgtacctccagatgaacaacctgaagcctgacgacaccgccgtgtactactgcgacgccaacagcagaggcaactactactctggccagggcacccaagtgaccgtgtcatctacgcgtaccacgacgccagcgccgcgaccaccaacaccggcgcccaccatcgcgtcgcagcccctgtccctgcgcccagaggcgtgccggccagcggcggggggcgcagtgcacacgagggggctggacttcgcctgtgacatctacatctgggcgcccttggccgggacttgtggggtccttctcctgtcactggttatcaccctttactgcaaacggggcagaaagaaactcctgtatatattcaaacaaccatttatgagaccagtacaaactactcaagaggaagatggctgtagctgccgatttccagaagaagaagaaggaggatgtgaactgagagtgaagttcagcaggagcgcagacgcccccgcgtaccagcagggccagaaccagctctataacgagctgaatctaggacgaagagaggagtacgatgttttggacaagagacgtggccgggaccctgagatggggggaaagccgagaaggaagaaccctcaggaaggcctgtacaatgaactgcagaaagataagatggcggaggcctacagtgagattgggatgaaaggcgagcgccggaggggcaaggggcacgatggcctttaccagggtctcagtacagccaccaaggacacctacgacgcccttcacatgcaggccctgccccctcgctaa

SEQ ID NO: 9138 - DNA, 1119 bp, synthetic construct
  source 1..1119: mol_type = other DNA
atggccctgcctgtgacagctctgctgctgcctctggcactgctgctgcacgccgccagacctcaggttcagctgcaagagtctggcggaggactggttcaacctggcggaagcctgagactgtcttgtgccgccagcggcttcacctttagcagctacgccatgacctgggtccgacaggctcctggcaaaggactggaatgggtgtccgacatcaatagcggcggaggcagcaccaactacgccgattctgtgaagggcagattcaccatcagccgggacaacgccaagaacaccctgtacctccagatgaacagcctgaagccagaggacaccgccgtgtactactgtgccacagagctgagaggcagcgactactacagaggccccatcagagagtacgcctattggggccagggcaccctggttacagtcagctctacgcgtaccacgacgccagcgccgcgaccaccaacaccggcgcccaccatcgcgtcgcagcccctgtccctgcgcccagaggcgtgccggccagcggcggggggcgcagtgcacacgagggggctggacttcgcctgtgacatctacatctgggcgcccttggccgggacttgtggggtccttctcctgtcactggttatcaccctttactgcaaacggggcagaaagaaactcctgtatatattcaaacaaccatttatgagaccagtacaaactactcaagaggaagatggctgtagctgccgatttccagaagaagaagaaggaggatgtgaactgagagtgaagttcagcaggagcgcagacgcccccgcgtaccagcagggccagaaccagctctataacgagctgaatctaggacgaagagaggagtacgatgttttggacaagagacgtggccgggaccctgagatggggggaaagccgagaaggaagaaccctcaggaaggcctgtacaatgaactgcagaaagataagatggcggaggcctacagtgagattgggatgaaaggcgagcgccggaggggcaaggggcacgatggcctttaccagggtctcagtacagccaccaaggacacctacgacgcccttcacatgcaggccctgccccctcgctaa

SEQ ID NO: 9139 - DNA, 1119 bp, synthetic construct
  source 1..1119: mol_type = other DNA
atggccctgcctgtgacagctctgctgctgcctctggcactgctgctgcacgccgccagacctcaggttcagctgcaagagtctggcggaggactggttcaacctggcggaagcctgagactgtcttgtgccgccagcggcttcacctttagcagctacgccatgacctgggtccgacaggctcctggcaaaggactggaatgggtgtccgacatcaatagcggcggaggcagcaccaactacgccgattctgtgaagggcagattcaccatcagccgggacaacgccaagaacaccctgtacctccagatgaacagcctgaagccagaggacaccgccgtgtactactgtgccacagagctgagaggcagcgactactacagaggccccatcagagagtacgcctgttggggccagggcaccctggttacagtcagctctacgcgtaccacgacgccagcgccgcgaccaccaacaccggcgcccaccatcgcgtcgcagcccctgtccctgcgcccagaggcgtgccggccagcggcggggggcgcagtgcacacgagggggctggacttcgcctgtgacatctacatctgggcgcccttggccgggacttgtggggtccttctcctgtcactggttatcaccctttactgcaaacggggcagaaagaaactcctgtatatattcaaacaaccatttatgagaccagtacaaactactcaagaggaagatggctgtagctgccgatttccagaagaagaagaaggaggatgtgaactgagagtgaagttcagcaggagcgcagacgcccccgcgtaccagcagggccagaaccagctctataacgagctgaatctaggacgaagagaggagtacgatgttttggacaagagacgtggccgggaccctgagatggggggaaagccgagaaggaagaaccctcaggaaggcctgtacaatgaactgcagaaagataagatggcggaggcctacagtgagattgggatgaaaggcgagcgccggaggggcaaggggcacgatggcctttaccagggtctcagtacagccaccaaggacacctacgacgcccttcacatgcaggccctgccccctcgctaa

SEQ ID NO: 9140 - DNA, 1812 bp, synthetic construct
  source 1..1812: mol_type = other DNA
atggccttaccagtgaccgccttgctcctgccgctggccttgctgctccacgccgccaggccgcaggttcagctgcaagagtctggcggaggactggttcaagctggcggaagcctgagactgagctgtgttgcctctggcagcatccggtccatcaacgtgatgggctggtacagacaggcccctggcaaacagagagaactggttgccgcctgtgccagcgacggcaatacctactatgccgacagcgtgaagggcagattcaccatcagccgggacaacgccgagaaaaccgtgtacctccagatgaacaacctgaagcctgacgacaccgccgtgtactactgcgacgccaacagcaggggcaactactattctggccagggcacccaagtgaccgtgtctagtacgcgtggaggcagtggtgtcttcacactcgaagatttcgttggggactggcgacagacagccggctacaacctggaccaagtccttgaacagggaggtgtgtccagtttgtttcagaatctcggggtgtccgtaactccgatccaaaggattgtcctgagcggtgaaaatgggctgaagatcgacatccatgtcatcatcccgtatgaaggtctgagcggcgaccaaatgggccagatcgaaaaaatttttaaggtggtgtaccctgtggatgatcatcactttaaggtgatcctgcactatggcacactggtaatcgacggggttacgccgaacatgatcgactatttcggacggccctatgaaggcatcgccgtgttcgacggcaaaaagatcactgtaacagggaccctgtggaacggcaacaaaattatcgacgagcgcctgatcaaccccgacggctccctgctgttccgagtaaccatcaacggagtgaccggctggcggctgtgcgaacgcattctggcgctcgagggaggcagctggagccaccctcagtttgaaaaagactacaaagacgatgacgataagggatcagattacaaggatgatgatgacaaggggtcagattataaagacgacgatgataaagggagcgactacaaggacgacgatgacaaggcctggtcccatccccagttcgagaaacaccatcaccaccaccatcatcacactagtggctccggcgagggcagaggaagtctactaacctgcggagatgtggaagaaaatcctggcccacatatgaccgagtacaagcccacggtgcgcctcgccacccgcgacgacgtccccagggccgtacgcaccctcgccgccgcgttcgccgactaccccgccacgcgccacaccgtcgatccggaccgccacatcgagcgggtcaccgagctgcaagaactcttcctcacgcgcgtcgggctcgacatcggcaaggtgtgggtcgcggacgacggcgccgcggtggcggtctggaccacgccggagagcgtcgaagcgggggcggtgttcgccgagatcggcccgcgcatggccgagttgagcggttcccggctggccgcgcagcaacagatggaaggcctcctggcgccgcaccggcccaaggagcccgcgtggttcctggccaccgtcggcgtctcgcccgaccaccagggcaagggtctgggcagcgccgtcgtgctccccggagtggaggcggccgagcgcgccggggtgcccgccttcctggagacctccgcgccccgcaacctccccttctacgagcggctcggcttcaccgtcaccgccgacgtcgaggtgcccgaaggaccgcgcacctggtgcatgacccgcaagcccggtgcctga

SEQ ID NO: 9141 - DNA, 1812 bp, synthetic construct
  source 1..1812: mol_type = other DNA
atggccttaccagtgaccgccttgctcctgccgctggccttgctgctccacgccgccaggccgcaggttcagctgcaagagtctggcggaggactggttcaagctggcggaagcctgagactgagctgtgttgcctctggcgacatccggtccatcaacgtgatgggctggtacagacaggcccctggcaaacagagagaactggttgccgcctgtgccagcgacggcaatacctactatgccgacagcgtgaagggcagattcaccatcagccgggacaacgccgagaaaaccgtgtacctccagatgaacaacctgaagcctgacgacaccgccgtgtactactgcgacgccaacagcaggggcaactactattctggccagggcacccaagtgaccgtgtctagtacgcgtggaggcagtggtgtcttcacactcgaagatttcgttggggactggcgacagacagccggctacaacctggaccaagtccttgaacagggaggtgtgtccagtttgtttcagaatctcggggtgtccgtaactccgatccaaaggattgtcctgagcggtgaaaatgggctgaagatcgacatccatgtcatcatcccgtatgaaggtctgagcggcgaccaaatgggccagatcgaaaaaatttttaaggtggtgtaccctgtggatgatcatcactttaaggtgatcctgcactatggcacactggtaatcgacggggttacgccgaacatgatcgactatttcggacggccctatgaaggcatcgccgtgttcgacggcaaaaagatcactgtaacagggaccctgtggaacggcaacaaaattatcgacgagcgcctgatcaaccccgacggctccctgctgttccgagtaaccatcaacggagtgaccggctggcggctgtgcgaacgcattctggcgctcgagggaggcagctggagccaccctcagtttgaaaaagactacaaagacgatgacgataagggatcagattacaaggatgatgatgacaaggggtcagattataaagacgacgatgataaagggagcgactacaaggacgacgatgacaaggcctggtcccatccccagttcgagaaacaccatcaccaccaccatcatcacactagtggctccggcgagggcagaggaagtctactaacctgcggagatgtggaagaaaatcctggcccacatatgaccgagtacaagcccacggtgcgcctcgccacccgcgacgacgtccccagggccgtacgcaccctcgccgccgcgttcgccgactaccccgccacgcgccacaccgtcgatccggaccgccacatcgagcgggtcaccgagctgcaagaactcttcctcacgcgcgtcgggctcgacatcggcaaggtgtgggtcgcggacgacggcgccgcggtggcggtctggaccacgccggagagcgtcgaagcgggggcggtgttcgccgagatcggcccgcgcatggccgagttgagcggttcccggctggccgcgcagcaacagatggaaggcctcctggcgccgcaccggcccaaggagcccgcgtggttcctggccaccgtcggcgtctcgcccgaccaccagggcaagggtctgggcagcgccgtcgtgctccccggagtggaggcggccgagcgcgccggggtgcccgccttcctggagacctccgcgccccgcaacctccccttctacgagcggctcggcttcaccgtcaccgccgacgtcgaggtgcccgaaggaccgcgcacctggtgcatgacccgcaagcccggtgcctga

SEQ ID NO: 9142 - DNA, 1812 bp, synthetic construct
  source 1..1812: mol_type = other DNA
atggccttaccagtgaccgccttgctcctgccgctggccttgctgctccacgccgccaggccgcaggttcagctgcaagagtctggcggaggactggttcaagctggcggaagcctgagactgagctgtgttgcctctggcagcacccggtccatcaacgtgatgggctggtacagacaggcccctggcaaacagagagaactggttgccgcctgtgccagcgacggcaatacctactatgccgacagcgtgaagggcagattcaccatcagccgggacaacgccgagaaaaccgtgtacctccagatgaacaacctgaagcctgacgacaccgccgtgtactactgcgacgccaacagcaggggcaactactattctggccagggcacccaagtgaccgtgtctagtacgcgtggaggcagtggtgtcttcacactcgaagatttcgttggggactggcgacagacagccggctacaacctggaccaagtccttgaacagggaggtgtgtccagtttgtttcagaatctcggggtgtccgtaactccgatccaaaggattgtcctgagcggtgaaaatgggctgaagatcgacatccatgtcatcatcccgtatgaaggtctgagcggcgaccaaatgggccagatcgaaaaaatttttaaggtggtgtaccctgtggatgatcatcactttaaggtgatcctgcactatggcacactggtaatcgacggggttacgccgaacatgatcgactatttcggacggccctatgaaggcatcgccgtgttcgacggcaaaaagatcactgtaacagggaccctgtggaacggcaacaaaattatcgacgagcgcctgatcaaccccgacggctccctgctgttccgagtaaccatcaacggagtgaccggctggcggctgtgcgaacgcattctggcgctcgagggaggcagctggagccaccctcagtttgaaaaagactacaaagacgatgacgataagggatcagattacaaggatgatgatgacaaggggtcagattataaagacgacgatgataaagggagcgactacaaggacgacgatgacaaggcctggtcccatccccagttcgagaaacaccatcaccaccaccatcatcacactagtggctccggcgagggcagaggaagtctactaacctgcggagatgtggaagaaaatcctggcccacatatgaccgagtacaagcccacggtgcgcctcgccacccgcgacgacgtccccagggccgtacgcaccctcgccgccgcgttcgccgactaccccgccacgcgccacaccgtcgatccggaccgccacatcgagcgggtcaccgagctgcaagaactcttcctcacgcgcgtcgggctcgacatcggcaaggtgtgggtcgcggacgacggcgccgcggtggcggtctggaccacgccggagagcgtcgaagcgggggcggtgttcgccgagatcggcccgcgcatggccgagttgagcggttcccggctggccgcgcagcaacagatggaaggcctcctggcgccgcaccggcccaaggagcccgcgtggttcctggccaccgtcggcgtctcgcccgaccaccagggcaagggtctgggcagcgccgtcgtgctccccggagtggaggcggccgagcgcgccggggtgcccgccttcctggagacctccgcgccccgcaacctccccttctacgagcggctcggcttcaccgtcaccgccgacgtcgaggtgcccgaaggaccgcgcacctggtgcatgacccgcaagcccggtgcctga

SEQ ID NO: 9143 - DNA, 1821 bp, synthetic construct
  source 1..1821: mol_type = other DNA
atggccctgcctgtgacagctctgctgctgcctctggcactgctgctgcacgccgccagacctcaggttcagctgcaagagtctggcggaggactggttcaagctggcggaagcctgagactgtcttgtgccgccagcggcagcatcttcggcatcaacgagatcaacctgatgggctggtacagacaggcccctggcaaacagagagaactggttgccgcctgtgccagcgacggcaatacctactatgccgacagcgtgaagggcagattcaccatcagccgggacaacgccgagaaaaccgtgtacctccagatgaacaacctgaagcctgacgacaccgccgtgtactactgcgacgccaacagcagaggcaactactactctggccagggcacccaagtgaccgtgtcatctacgcgtggaggcagtggtgtcttcacactcgaagatttcgttggggactggcgacagacagccggctacaacctggaccaagtccttgaacagggaggtgtgtccagtttgtttcagaatctcggggtgtccgtaactccgatccaaaggattgtcctgagcggtgaaaatgggctgaagatcgacatccatgtcatcatcccgtatgaaggtctgagcggcgaccaaatgggccagatcgaaaaaatttttaaggtggtgtaccctgtggatgatcatcactttaaggtgatcctgcactatggcacactggtaatcgacggggttacgccgaacatgatcgactatttcggacggccctatgaaggcatcgccgtgttcgacggcaaaaagatcactgtaacagggaccctgtggaacggcaacaaaattatcgacgagcgcctgatcaaccccgacggctccctgctgttccgagtaaccatcaacggagtgaccggctggcggctgtgcgaacgcattctggcgctcgagggaggcagctggagccaccctcagtttgaaaaagactacaaagacgatgacgataagggatcagattacaaggatgatgatgacaaggggtcagattataaagacgacgatgataaagggagcgactacaaggacgacgatgacaaggcctggtcccatccccagttcgagaaacaccatcaccaccaccatcatcacactagtggctccggcgagggcagaggaagtctactaacctgcggagatgtggaagaaaatcctggcccacatatgaccgagtacaagcccacggtgcgcctcgccacccgcgacgacgtccccagggccgtacgcaccctcgccgccgcgttcgccgactaccccgccacgcgccacaccgtcgatccggaccgccacatcgagcgggtcaccgagctgcaagaactcttcctcacgcgcgtcgggctcgacatcggcaaggtgtgggtcgcggacgacggcgccgcggtggcggtctggaccacgccggagagcgtcgaagcgggggcggtgttcgccgagatcggcccgcgcatggccgagttgagcggttcccggctggccgcgcagcaacagatggaaggcctcctggcgccgcaccggcccaaggagcccgcgtggttcctggccaccgtcggcgtctcgcccgaccaccagggcaagggtctgggcagcgccgtcgtgctccccggagtggaggcggccgagcgcgccggggtgcccgccttcctggagacctccgcgccccgcaacctccccttctacgagcggctcggcttcaccgtcaccgccgacgtcgaggtgcccgaaggaccgcgcacctggtgcatgacccgcaagcccggtgcctga

SEQ ID NO: 9144 - DNA, 1821 bp, synthetic construct
  source 1..1821: mol_type = other DNA
atggccctgcctgtgacagctctgctgctgcctctggcactgctgctgcacgccgccagacctcaggttcagctgcaagagtctggcggaggactggttcaagctggcggaagcctgagactgtcttgtgccgccagcggcagcatcttcagcatcaacgagatcaacctgatgggctggtacagacaggcccctggcaaacagagagaactggttgccgcctgtgccagcgacggcaatacctactatgccgacagcgtgaagggcagattcaccatcagccgggacaacgccgagaaaaccgtgtacctccagatgaacaacctgaagcctgacgacaccgccgtgtactactgcgacgccaacagcagaggcaactactactctggccagggcacccaagtgaccgtgtcatctacgcgtggaggcagtggtgtcttcacactcgaagatttcgttggggactggcgacagacagccggctacaacctggaccaagtccttgaacagggaggtgtgtccagtttgtttcagaatctcggggtgtccgtaactccgatccaaaggattgtcctgagcggtgaaaatgggctgaagatcgacatccatgtcatcatcccgtatgaaggtctgagcggcgaccaaatgggccagatcgaaaaaatttttaaggtggtgtaccctgtggatgatcatcactttaaggtgatcctgcactatggcacactggtaatcgacggggttacgccgaacatgatcgactatttcggacggccctatgaaggcatcgccgtgttcgacggcaaaaagatcactgtaacagggaccctgtggaacggcaacaaaattatcgacgagcgcctgatcaaccccgacggctccctgctgttccgagtaaccatcaacggagtgaccggctggcggctgtgcgaacgcattctggcgctcgagggaggcagctggagccaccctcagtttgaaaaagactacaaagacgatgacgataagggatcagattacaaggatgatgatgacaaggggtcagattataaagacgacgatgataaagggagcgactacaaggacgacgatgacaaggcctggtcccatccccagttcgagaaacaccatcaccaccaccatcatcacactagtggctccggcgagggcagaggaagtctactaacctgcggagatgtggaagaaaatcctggcccacatatgaccgagtacaagcccacggtgcgcctcgccacccgcgacgacgtccccagggccgtacgcaccctcgccgccgcgttcgccgactaccccgccacgcgccacaccgtcgatccggaccgccacatcgagcgggtcaccgagctgcaagaactcttcctcacgcgcgtcgggctcgacatcggcaaggtgtgggtcgcggacgacggcgccgcggtggcggtctggaccacgccggagagcgtcgaagcgggggcggtgttcgccgagatcggcccgcgcatggccgagttgagcggttcccggctggccgcgcagcaacagatggaaggcctcctggcgccgcaccggcccaaggagcccgcgtggttcctggccaccgtcggcgtctcgcccgaccaccagggcaagggtctgggcagcgccgtcgtgctccccggagtggaggcggccgagcgcgccggggtgcccgccttcctggagacctccgcgccccgcaacctccccttctacgagcggctcggcttcaccgtcaccgccgacgtcgaggtgcccgaaggaccgcgcacctggtgcatgacccgcaagcccggtgcctga

SEQ ID NO: 9145 - DNA, 1845 bp, synthetic construct
  source 1..1845: mol_type = other DNA
atggccctgcctgtgacagctctgctgctgcctctggcactgctgctgcacgccgccagacctcaggttcagctgcaagagtctggcggaggactggttcaacctggcggaagcctgagactgtcttgtgccgccagcggcttcacctttagcagctacgccatgacctgggtccgacaggctcctggcaaaggactggaatgggtgtccgacatcaatagcggcggaggcagcaccaactacgccgattctgtgaagggcagattcaccatcagccgggacaacgccaagaacaccctgtacctccagatgaacagcctgaagccagaggacaccgccgtgtactactgtgccacagagctgagaggcagcgactactacagaggccccatcagagagtacgcctattggggccagggcaccctggttacagtcagctctacgcgtggaggcagtggtgtcttcacactcgaagatttcgttggggactggcgacagacagccggctacaacctggaccaagtccttgaacagggaggtgtgtccagtttgtttcagaatctcggggtgtccgtaactccgatccaaaggattgtcctgagcggtgaaaatgggctgaagatcgacatccatgtcatcatcccgtatgaaggtctgagcggcgaccaaatgggccagatcgaaaaaatttttaaggtggtgtaccctgtggatgatcatcactttaaggtgatcctgcactatggcacactggtaatcgacggggttacgccgaacatgatcgactatttcggacggccctatgaaggcatcgccgtgttcgacggcaaaaagatcactgtaacagggaccctgtggaacggcaacaaaattatcgacgagcgcctgatcaaccccgacggctccctgctgttccgagtaaccatcaacggagtgaccggctggcggctgtgcgaacgcattctggcgctcgagggaggcagctggagccaccctcagtttgaaaaagactacaaagacgatgacgataagggatcagattacaaggatgatgatgacaaggggtcagattataaagacgacgatgataaagggagcgactacaaggacgacgatgacaaggcctggtcccatccccagttcgagaaacaccatcaccaccaccatcatcacactagtggctccggcgagggcagaggaagtctactaacctgcggagatgtggaagaaaatcctggcccacatatgaccgagtacaagcccacggtgcgcctcgccacccgcgacgacgtccccagggccgtacgcaccctcgccgccgcgttcgccgactaccccgccacgcgccacaccgtcgatccggaccgccacatcgagcgggtcaccgagctgcaagaactcttcctcacgcgcgtcgggctcgacatcggcaaggtgtgggtcgcggacgacggcgccgcggtggcggtctggaccacgccggagagcgtcgaagcgggggcggtgttcgccgagatcggcccgcgcatggccgagttgagcggttcccggctggccgcgcagcaacagatggaaggcctcctggcgccgcaccggcccaaggagcccgcgtggttcctggccaccgtcggcgtctcgcccgaccaccagggcaagggtctgggcagcgccgtcgtgctccccggagtggaggcggccgagcgcgccggggtgcccgccttcctggagacctccgcgccccgcaacctccccttctacgagcggctcggcttcaccgtcaccgccgacgtcgaggtgcccgaaggaccgcgcacctggtgcatgacccgcaagcccggtgcctga

SEQ ID NO: 9146 - DNA, 25 bp, synthetic construct
  source 1..25: mol_type = other DNA
ggggggggggggggggggggggggg

SEQ ID NO: 9147 - DNA, 2976 bp, synthetic construct
  source 1..2976: mol_type = other DNA
atggactggatttggcgcatccttttccttgtcggcgctgctaccggcgcccattccgaattcggaagcggtacccaccatcaccaccaccatcatcactggagccaccctcagtttgaaaaagactacaaagacgatgacgataagtggtctcatccacagttcgagaagggatcagattacaaggatgatgatgacaaggggtcagattataaagacgacgatgataaagggagcgactacaaggacgacgatgacaaggcctggtcccatccccagttcgagaaaggaggcggatccagcggattcgaagtcttcacactcgaagatttcgttggggactggcgacagacagccggctacaacctggaccaagtccttgaacagggaggtgtgtccagtttgtttcagaatctcggggtgtccgtaactccgatccaaaggattgtcctgagcggtgaaaatgggctgaagatcgacatccatgtcatcatcccgtatgaaggtctgagcggcgaccaaatgggccagatcgaaaaaatttttaaggtggtgtaccctgtggatgatcatcactttaaggtgatcctgcactatggcacactggtaatcgacggggttacgccgaacatgatcgactatttcggacggccgtatgaaggcatcgccgtgttcgacggcaaaaagatcactgtaacagggaccctgtggaacggcaacaaaattatcgacgagcgcctgatcaaccccgacggctccctgctgttccgagtaaccatcaacggagtgaccggctggcggctgtgcgaacgcattctggcgctcgagggcggaagcggaggctctgggcccaagagcagcaacgaggccaccaacatcacccctaagcacaacatgaaggcttttctggacgagctgaaggccgagaatatcaagaagttcctgtacaacttcacgcagatccctcacctggccggcaccgagcagaattttcagctggccaagcagatccagagccagtggaaagagttcggcctggactctgtggaactggcccactacgatgtgctgctgagctaccccaacaagacacaccccaactacatcagcatcatcaacgaggacggcaacgagattttcaacaccagcctgttcgagcctccacctcctggctacgagaacgtgtccgatatcgtgcctccattcagcgctttcagccctcaagggatgcctgagggcgatctggtgtacgtgaactacgccagaaccgaggacttcttcaagctggaacgggacatgaagatcaactgcagcggcaagatcgtgatcgccagatacggcaaggtgttccggggcaacaaagtgaagaacgcccaactggctggcgccaagggcgtgatcctgtattctgaccccgccgactatttcgcccctggcgtgaagtcttaccccgacggatggaatcttcctggcggcggagtgcagagaggcaacatcctgaatctgaacggcgctggcgaccctctgacacctggatatcctgccaacgagtacgcctacagacggggaattgccgaagctgtgggcctgccttctatccctgtgcaccctatcggctactacgacgcccagaaactgctggaaaagatgggcggaagcgcccctcctgactcttcttggagaggctctctgaaggtgccctacaatgtcggcccaggcttcaccggcaacttcagcacccagaaagtgaaaatgcacatccacagcaccaacgaagtgacccggatctacaacgtgatcggcacactgagaggcgccgtggaacccgacagatatgtgatcctcggcggccacagagacagctgggtgttcggaggaatcgaccctcaatctggcgccgctgtggtgcacgaaatcgtgcggtcttttggcaccctgaagaaagaaggctggcggcccagacggaccatcctgtttgcctcttgggacgccgaggaatttggcctgctgggctctacagagtgggccgaagagaacagcagactgctgcaagaaagaggcgtggcctacatcaacgccgacagcagcatcgagggcaactacaccctgagagtggactgcacccctctgatgtacagcctggtgcacaacctgaccaaagagctgaagtcccctgacgagggctttgagggcaagagcctgtacgagagctggaccaagaagtccccatctcctgagttcagcggaatgccccggatcagcaagctcggctccggcaatgatttcgaggtgttcttccagcggctgggaatcgcttctggcagagccagatacaccaagaactgggagacaaacaagttctccggctatcccctgtaccacagcgtgtacgagacatacgagctggtggaaaagttctacgaccccatgttcaagtaccacctgacagtggcccaagtgcgcggaggcatggtgttcgagctggccaatagcatcgtgctgcccttcgactgcagagactatgccgtggtgctgcggaagtacgccgacaaaatctacagcatcagcatgaagcacccgcaagagatgaagacctacagcgtgtccttcgactccctgttcagcgccgtgaagaacttcaccgagatcgccagcaagttcagcgagcggctgcaggacttcgacaagagcaaccctatcgtgctgaggatgatgaacgaccagctgatgttcctggaacgcgccttcatcgacccactgggactgcccgatagacccttctaccggcacgtgatctatgcccctagcagccacaacaaatacgccggcgagagcttccccggcatctacgatgccctgttcgacatcgagagcaaggtggaccctagcaaagcctggggcgaagtgaagcggcaaatctacgtggccgcattcacagtgcaggccgctgccgaaacactgtctgaagtggcttaa

SEQ ID NO: 9148 - DNA, 1524 bp, synthetic construct
  source 1..1524: mol_type = other DNA
atggactggatttggcgcatccttttccttgtcggcgctgctaccggcgcccattccgaattcggaagcggtacccaccatcaccaccaccatcatcactggagccaccctcagtttgaaaaagactacaaagacgatgacgataagtggtctcatccacagttcgagaagggatcagattacaaggatgatgatgacaaggggtcagattataaagacgacgatgataaagggagcgactacaaggacgacgatgacaaggcctggtcccatccccagttcgagaaaggaggcggatccagcggattcgaagtcttcacactcgaagatttcgttggggactggcgacagacagccggctacaacctggaccaagtccttgaacagggaggtgtgtccagtttgtttcagaatctcggggtgtccgtaactccgatccaaaggattgtcctgagcggtgaaaatgggctgaagatcgacatccatgtcatcatcccgtatgaaggtctgagcggcgaccaaatgggccagatcgaaaaaatttttaaggtggtgtaccctgtggatgatcatcactttaaggtgatcctgcactatggcacactggtaatcgacggggttacgccgaacatgatcgactatttcggacggccgtatgaaggcatcgccgtgttcgacggcaaaaagatcactgtaacagggaccctgtggaacggcaacaaaattatcgacgagcgcctgatcaaccccgacggctccctgctgttccgagtaaccatcaacggagtgaccggctggcggctgtgcgaacgcattctggcgctcgagggaggcggaagcaacaagacacaccccaactacatcagcatcatcaacgaggacggcaacgagattttcaacaccagcctgttcgagcctccacctcctggctacgagaacgtgtccgatatcgtgcctccattcagcgctttcagccctcaagggatgcctgagggcgatctggtgtacgtgaactacgccagaaccgaggacttcttcaagctggaacgggacatgaagatcaactgcagcggcaagatcgtgatcgccagatacggcaaggtgttccggggcaacaaagtgaagaacgcccaactggctggcgccaagggcgtgatcctgtattctgaccccgccgactatttcgcccctggcgtgaagtcttaccccgacggatggaatcttcctggcggcggagtgcagagaggcaacatcctgaatctgaacggcgctggcgaccctctgacacctggatatcctgccaacgagtacgcctacagacggggaattgccgaagctgtgggcctgccttctatccctgtgcaccctatcggctactacgacgcccagaaactgctggaaaagatgggcggaagcgcccctcctgactcttcttggagaggctctctgaaggtgccctacaatgtcggcccaggcttcaccggcaacttcagcacccagaaagtgaaaatgcacatccactaa

SEQ ID NO: 9149 - DNA, 3066 bp, synthetic construct
  source 1..3066: mol_type = other DNA
atggactggatttggcgcatccttttccttgtcggcgctgctaccggcgcccattccgaattcgagaaaaccatcagcaaggccaagggccagccaagggaaccccaggtttacacactgcctccaagccaagaggaaatgaccaagaaccaggtgtccctgacctgccttgtgaagggcttctaccccagcgacattgccgtggaatgggagtctaacggccagcctgagaacaactacaagacaacccctcctgtgctggacagcgacggctcattcttcctgtacagcagactgaccgtggacaagagcagatggcaagagggcaacgtgttcagctgctccgtgatgcacgaagccctgcataaccactacacccagaagtctctgagcctgagtccgggtaaaggatccagcggattcgaagtcttcacactcgaagatttcgttggggactggcgacagacagccggctacaacctggaccaagtccttgaacagggaggtgtgtccagtttgtttcagaatctcggggtgtccgtaactccgatccaaaggattgtcctgagcggtgaaaatgggctgaagatcgacatccatgtcatcatcccgtatgaaggtctgagcggcgaccaaatgggccagatcgaaaaaatttttaaggtggtgtaccctgtggatgatcatcactttaaggtgatcctgcactatggcacactggtaatcgacggggttacgccgaacatgatcgactatttcggacggccgtatgaaggcatcgccgtgttcgacggcaaaaagatcactgtaacagggaccctgtggaacggcaacaaaattatcgacgagcgcctgatcaaccccgacggctccctgctgttccgagtaaccatcaacggagtgaccggctggcggctgtgcgaacgcattctggcgctcgagaagagcagcaacgaggccaccaacatcacccctaagcacaacatgaaggcttttctggacgagctgaaggccgagaatatcaagaagttcctgtacaacttcacgcagatccctcacctggccggcaccgagcagaattttcagctggccaagcagatccagagccagtggaaagagttcggcctggactctgtggaactggcccactacgatgtgctgctgagctaccccaacaagacacaccccaactacatcagcatcatcaacgaggacggcaacgagattttcaacaccagcctgttcgagcctccacctcctggctacgagaacgtgtccgatatcgtgcctccattcagcgctttcagccctcaagggatgcctgagggcgatctggtgtacgtgaactacgccagaaccgaggacttcttcaagctggaacgggacatgaagatcaactgcagcggcaagatcgtgatcgccagatacggcaaggtgttccggggcaacaaagtgaagaacgcccaactggctggcgccaagggcgtgatcctgtattctgaccccgccgactatttcgcccctggcgtgaagtcttaccccgacggatggaatcttcctggcggcggagtgcagagaggcaacatcctgaatctgaacggcgctggcgaccctctgacacctggatatcctgccaacgagtacgcctacagacggggaattgccgaagctgtgggcctgccttctatccctgtgcaccctatcggctactacgacgcccagaaactgctggaaaagatgggcggaagcgcccctcctgactcttcttggagaggctctctgaaggtgccctacaatgtcggcccaggcttcaccggcaacttcagcacccagaaagtgaaaatgcacatccacagcaccaacgaagtgacccggatctacaacgtgatcggcacactgagaggcgccgtggaacccgacagatatgtgatcctcggcggccacagagacagctgggtgttcggaggaatcgaccctcaatctggcgccgctgtggtgcacgaaatcgtgcggtcttttggcaccctgaagaaagaaggctggcggcccagacggaccatcctgtttgcctcttgggacgccgaggaatttggcctgctgggctctacagagtgggccgaagagaacagcagactgctgcaagaaagaggcgtggcctacatcaacgccgacagcagcatcgagggcaactacaccctgagagtggactgcacccctctgatgtacagcctggtgcacaacctgaccaaagagctgaagtcccctgacgagggctttgagggcaagagcctgtacgagagctggaccaagaagtccccatctcctgagttcagcggaatgccccggatcagcaagctcggctccggcaatgatttcgaggtgttcttccagcggctgggaatcgcttctggcagagccagatacaccaagaactgggagacaaacaagttctccggctatcccctgtaccacagcgtgtacgagacatacgagctggtggaaaagttctacgaccccatgttcaagtaccacctgacagtggcccaagtgcgcggaggcatggtgttcgagctggccaatagcatcgtgctgcccttcgactgcagagactatgccgtggtgctgcggaagtacgccgacaaaatctacagcatcagcatgaagcacccgcaagagatgaagacctacagcgtgtccttcgactccctgttcagcgccgtgaagaacttcaccgagatcgccagcaagttcagcgagcggctgcaggacttcgacaagagcaaccctatcgtgctgaggatgatgaacgaccagctgatgttcctggaacgcgccttcatcgacccactgggactgcccgatagacccttctaccggcacgtgatctatgcccctagcagccacaacaaatacgccggcgagagcttccccggcatctacgatgccctgttcgacatcgagagcaaggtggaccctagcaaagcctggggcgaagtgaagcggcaaatctacgtggccgcattcacagtgcaggccgctgccgaaacactgtctgaagtggcttaa

SEQ ID NO: 9150 - DNA, 2958 bp, synthetic construct
  source 1..2958: mol_type = other DNA
atggccttaccagtgaccgccttgctcctgccgctggccttgctgctccacgccgccaggccggaattctctggatccaagagcagcaacgaggccaccaacatcacccctaagcacaacatgaaggcttttctggacgagctgaaggccgagaatatcaagaagttcctgtacaacttcacgcagatccctcacctggccggcaccgagcagaattttcagctggccaagcagatccagagccagtggaaagagttcggcctggactctgtggaactggcccactacgatgtgctgctgagctaccccaacaagacacaccccaactacatcagcatcatcaacgaggacggcaacgagattttcaacaccagcctgttcgagcctccacctcctggctacgagaacgtgtccgatatcgtgcctccattcagcgctttcagccctcaagggatgcctgagggcgatctggtgtacgtgaactacgccagaaccgaggacttcttcaagctggaacgggacatgaagatcaactgcagcggcaagatcgtgatcgccagatacggcaaggtgttccggggcaacaaagtgaagaacgcccaactggctggcgccaagggcgtgatcctgtattctgaccccgccgactatttcgcccctggcgtgaagtcttaccccgacggatggaatcttcctggcggcggagtgcagagaggcaacatcctgaatctgaacggcgctggcgaccctctgacacctggatatcctgccaacgagtacgcctacagacggggaattgccgaagctgtgggcctgccttctatccctgtgcaccctatcggctactacgacgcccagaaactgctggaaaagatgggcggaagcgcccctcctgactcttcttggagaggctctctgaaggtgccctacaatgtcggcccaggcttcaccggcaacttcagcacccagaaagtgaaaatgcacatccacagcaccaacgaagtgacccggatctacaacgtgatcggcacactgagaggcgccgtggaacccgacagatatgtgatcctcggcggccacagagacagctgggtgttcggaggaatcgaccctcaatctggcgccgctgtggtgcacgaaatcgtgcggtcttttggcaccctgaagaaagaaggctggcggcccagacggaccatcctgtttgcctcttgggacgccgaggaatttggcctgctgggctctacagagtgggccgaagagaacagcagactgctgcaagaaagaggcgtggcctacatcaacgccgacagcagcatcgagggcaactacaccctgagagtggactgcacccctctgatgtacagcctggtgcacaacctgaccaaagagctgaagtcccctgacgagggctttgagggcaagagcctgtacgagagctggaccaagaagtccccatctcctgagttcagcggaatgccccggatcagcaagctcggctccggcaatgatttcgaggtgttcttccagcggctgggaatcgcttctggcagagccagatacaccaagaactgggagacaaacaagttctccggctatcccctgtaccacagcgtgtacgagacatacgagctggtggaaaagttctacgaccccatgttcaagtaccacctgacagtggcccaagtgcgcggaggcatggtgttcgagctggccaatagcatcgtgctgcccttcgactgcagagactatgccgtggtgctgcggaagtacgccgacaaaatctacagcatcagcatgaagcacccgcaagagatgaagacctacagcgtgtccttcgactccctgttcagcgccgtgaagaacttcaccgagatcgccagcaagttcagcgagcggctgcaggacttcgacaagagcaaccctatcgtgctgaggatgatgaacgaccagctgatgttcctggaacgcgccttcatcgacccactgggactgcccgatagacccttctaccggcacgtgatctatgcccctagcagccacaacaaatacgccggcgagagcttccccggcatctacgatgccctgttcgacatcgagagcaaggtggaccctagcaaagcctggggcgaagtgaagcggcaaatctacgtggccgcattcacagtgcaggccgctgccgaaacactgtctgaagtggctacgcgtggaggcagtggtgtcttcacactcgaagatttcgttggggactggcgacagacagccggctacaacctggaccaagtccttgaacagggaggtgtgtccagtttgtttcagaatctcggggtgtccgtaactccgatccaaaggattgtcctgagcggtgaaaatgggctgaagatcgacatccatgtcatcatcccgtatgaaggtctgagcggcgaccaaatgggccagatcgaaaaaatttttaaggtggtgtaccctgtggatgatcatcactttaaggtgatcctgcactatggcacactggtaatcgacggggttacgccgaacatgatcgactatttcggacggccctatgaaggcatcgccgtgttcgacggcaaaaagatcactgtaacagggaccctgtggaacggcaacaaaattatcgacgagcgcctgatcaaccccgacggctccctgctgttccgagtaaccatcaacggagtgaccggctggcggctgtgcgaacgcattctggcgctcgagggaggcagctggagccaccctcagtttgaaaaagactacaaagacgatgacgataagggatcagattacaaggatgatgatgacaaggggtcagattataaagacgacgatgataaagggagcgactacaaggacgacgatgacaaggcctggtcccatccccagttcgagaaacaccatcaccaccaccatcatcacactagaaggagtcgactgatccgataa

SEQ ID NO: 9151 - DNA, 3603 bp, synthetic construct
  source 1..3603: mol_type = other DNA
atggccttaccagtgaccgccttgctcctgccgctggccttgctgctccacgccgccaggccggaattctctggatccaagagcagcaacgaggccaccaacatcacccctaagcacaacatgaaggcttttctggacgagctgaaggccgagaatatcaagaagttcctgtacaacttcacgcagatccctcacctggccggcaccgagcagaattttcagctggccaagcagatccagagccagtggaaagagttcggcctggactctgtggaactggcccactacgatgtgctgctgagctaccccaacaagacacaccccaactacatcagcatcatcaacgaggacggcaacgagattttcaacaccagcctgttcgagcctccacctcctggctacgagaacgtgtccgatatcgtgcctccattcagcgctttcagccctcaagggatgcctgagggcgatctggtgtacgtgaactacgccagaaccgaggacttcttcaagctggaacgggacatgaagatcaactgcagcggcaagatcgtgatcgccagatacggcaaggtgttccggggcaacaaagtgaagaacgcccaactggctggcgccaagggcgtgatcctgtattctgaccccgccgactatttcgcccctggcgtgaagtcttaccccgacggatggaatcttcctggcggcggagtgcagagaggcaacatcctgaatctgaacggcgctggcgaccctctgacacctggatatcctgccaacgagtacgcctacagacggggaattgccgaagctgtgggcctgccttctatccctgtgcaccctatcggctactacgacgcccagaaactgctggaaaagatgggcggaagcgcccctcctgactcttcttggagaggctctctgaaggtgccctacaatgtcggcccaggcttcaccggcaacttcagcacccagaaagtgaaaatgcacatccacagcaccaacgaagtgacccggatctacaacgtgatcggcacactgagaggcgccgtggaacccgacagatatgtgatcctcggcggccacagagacagctgggtgttcggaggaatcgaccctcaatctggcgccgctgtggtgcacgaaatcgtgcggtcttttggcaccctgaagaaagaaggctggcggcccagacggaccatcctgtttgcctcttgggacgccgaggaatttggcctgctgggctctacagagtgggccgaagagaacagcagactgctgcaagaaagaggcgtggcctacatcaacgccgacagcagcatcgagggcaactacaccctgagagtggactgcacccctctgatgtacagcctggtgcacaacctgaccaaagagctgaagtcccctgacgagggctttgagggcaagagcctgtacgagagctggaccaagaagtccccatctcctgagttcagcggaatgccccggatcagcaagctcggctccggcaatgatttcgaggtgttcttccagcggctgggaatcgcttctggcagagccagatacaccaagaactgggagacaaacaagttctccggctatcccctgtaccacagcgtgtacgagacatacgagctggtggaaaagttctacgaccccatgttcaagtaccacctgacagtggcccaagtgcgcggaggcatggtgttcgagctggccaatagcatcgtgctgcccttcgactgcagagactatgccgtggtgctgcggaagtacgccgacaaaatctacagcatcagcatgaagcacccgcaagagatgaagacctacagcgtgtccttcgactccctgttcagcgccgtgaagaacttcaccgagatcgccagcaagttcagcgagcggctgcaggacttcgacaagagcaaccctatcgtgctgaggatgatgaacgaccagctgatgttcctggaacgcgccttcatcgacccactgggactgcccgatagacccttctaccggcacgtgatctatgcccctagcagccacaacaaatacgccggcgagagcttccccggcatctacgatgccctgttcgacatcgagagcaaggtggaccctagcaaagcctggggcgaagtgaagcggcaaatctacgtggccgcattcacagtgcaggccgctgccgaaacactgtctgaagtggctacgcgtggaggcagtggtgtcttcacactcgaagatttcgttggggactggcgacagacagccggctacaacctggaccaagtccttgaacagggaggtgtgtccagtttgtttcagaatctcggggtgtccgtaactccgatccaaaggattgtcctgagcggtgaaaatgggctgaagatcgacatccatgtcatcatcccgtatgaaggtctgagcggcgaccaaatgggccagatcgaaaaaatttttaaggtggtgtaccctgtggatgatcatcactttaaggtgatcctgcactatggcacactggtaatcgacggggttacgccgaacatgatcgactatttcggacggccctatgaaggcatcgccgtgttcgacggcaaaaagatcactgtaacagggaccctgtggaacggcaacaaaattatcgacgagcgcctgatcaaccccgacggctccctgctgttccgagtaaccatcaacggagtgaccggctggcggctgtgcgaacgcattctggcgctcgagggaggcagctggagccaccctcagtttgaaaaagactacaaagacgatgacgataagggatcagattacaaggatgatgatgacaaggggtcagattataaagacgacgatgataaagggagcgactacaaggacgacgatgacaaggcctggtcccatccccagttcgagaaacaccatcaccaccaccatcatcacactagtggctccggcgagggcagaggaagtctactaacctgcggagatgtggaagaaaatcctggcccacatatgaccgagtacaagcccacggtgcgcctcgccacccgcgacgacgtccccagggccgtacgcaccctcgccgccgcgttcgccgactaccccgccacgcgccacaccgtcgatccggaccgccacatcgagcgggtcaccgagctgcaagaactcttcctcacgcgcgtcgggctcgacatcggcaaggtgtgggtcgcggacgacggcgccgcggtggcggtctggaccacgccggagagcgtcgaagcgggggcggtgttcgccgagatcggcccgcgcatggccgagttgagcggttcccggctggccgcgcagcaacagatggaaggcctcctggcgccgcaccggcccaaggagcccgcgtggttcctggccaccgtcggcgtctcgcccgaccaccagggcaagggtctgggcagcgccgtcgtgctccccggagtggaggcggccgagcgcgccggggtgcccgccttcctggagacctccgcgccccgcaacctccccttctacgagcggctcggcttcaccgtcaccgccgacgtcgaggtgcccgaaggaccgcgcacctggtgcatgacccgcaagcccggtgcctga

SEQ ID NO: 9152 - DNA, 3612 bp, synthetic construct
  source 1..3612: mol_type = other DNA
atggactggatttggcgcatccttttccttgtcggcgctgctaccggcgcccattccgccagaagcgaggacagatacagaggatccaagagcagcaacgaggccaccaacatcacccctaagcacaacatgaaggcttttctggacgagctgaaggccgagaatatcaagaagttcctgtacaacttcacgcagatccctcacctggccggcaccgagcagaattttcagctggccaagcagatccagagccagtggaaagagttcggcctggactctgtggaactggcccactacgatgtgctgctgagctaccccaacaagacacaccccaactacatcagcatcatcaacgaggacggcaacgagattttcaacaccagcctgttcgagcctccacctcctggctacgagaacgtgtccgatatcgtgcctccattcagcgctttcagccctcaagggatgcctgagggcgatctggtgtacgtgaactacgccagaaccgaggacttcttcaagctggaacgggacatgaagatcaactgcagcggcaagatcgtgatcgccagatacggcaaggtgttccggggcaacaaagtgaagaacgcccaactggctggcgccaagggcgtgatcctgtattctgaccccgccgactatttcgcccctggcgtgaagtcttaccccgacggatggaatcttcctggcggcggagtgcagagaggcaacatcctgaatctgaacggcgctggcgaccctctgacacctggatatcctgccaacgagtacgcctacagacggggaattgccgaagctgtgggcctgccttctatccctgtgcaccctatcggctactacgacgcccagaaactgctggaaaagatgggcggaagcgcccctcctgactcttcttggagaggctctctgaaggtgccctacaatgtcggcccaggcttcaccggcaacttcagcacccagaaagtgaaaatgcacatccacagcaccaacgaagtgacccggatctacaacgtgatcggcacactgagaggcgccgtggaacccgacagatatgtgatcctcggcggccacagagacagctgggtgttcggaggaatcgaccctcaatctggcgccgctgtggtgcacgaaatcgtgcggtcttttggcaccctgaagaaagaaggctggcggcccagacggaccatcctgtttgcctcttgggacgccgaggaatttggcctgctgggctctacagagtgggccgaagagaacagcagactgctgcaagaaagaggcgtggcctacatcaacgccgacagcagcatcgagggcaactacaccctgagagtggactgcacccctctgatgtacagcctggtgcacaacctgaccaaagagctgaagtcccctgacgagggctttgagggcaagagcctgtacgagagctggaccaagaagtccccatctcctgagttcagcggaatgccccggatcagcaagctcggctccggcaatgatttcgaggtgttcttccagcggctgggaatcgcttctggcagagccagatacaccaagaactgggagacaaacaagttctccggctatcccctgtaccacagcgtgtacgagacatacgagctggtggaaaagttctacgaccccatgttcaagtaccacctgacagtggcccaagtgcgcggaggcatggtgttcgagctggccaatagcatcgtgctgcccttcgactgcagagactatgccgtggtgctgcggaagtacgccgacaaaatctacagcatcagcatgaagcacccgcaagagatgaagacctacagcgtgtccttcgactccctgttcagcgccgtgaagaacttcaccgagatcgccagcaagttcagcgagcggctgcaggacttcgacaagagcaaccctatcgtgctgaggatgatgaacgaccagctgatgttcctggaacgcgccttcatcgacccactgggactgcccgatagacccttctaccggcacgtgatctatgcccctagcagccacaacaaatacgccggcgagagcttccccggcatctacgatgccctgttcgacatcgagagcaaggtggaccctagcaaagcctggggcgaagtgaagcggcaaatctacgtggccgcattcacagtgcaggccgctgccgaaacactgtctgaagtggctacgcgtggaggcagtggtgtcttcacactcgaagatttcgttggggactggcgacagacagccggctacaacctggaccaagtccttgaacagggaggtgtgtccagtttgtttcagaatctcggggtgtccgtaactccgatccaaaggattgtcctgagcggtgaaaatgggctgaagatcgacatccatgtcatcatcccgtatgaaggtctgagcggcgaccaaatgggccagatcgaaaaaatttttaaggtggtgtaccctgtggatgatcatcactttaaggtgatcctgcactatggcacactggtaatcgacggggttacgccgaacatgatcgactatttcggacggccctatgaaggcatcgccgtgttcgacggcaaaaagatcactgtaacagggaccctgtggaacggcaacaaaattatcgacgagcgcctgatcaaccccgacggctccctgctgttccgagtaaccatcaacggagtgaccggctggcggctgtgcgaacgcattctggcgctcgagggaggcagctggagccaccctcagtttgaaaaagactacaaagacgatgacgataagggatcagattacaaggatgatgatgacaaggggtcagattataaagacgacgatgataaagggagcgactacaaggacgacgatgacaaggcctggtcccatccccagttcgagaaacaccatcaccaccaccatcatcacactagtggctccggcgagggcagaggaagtctactaacctgcggagatgtggaagaaaatcctggcccacatatgaccgagtacaagcccacggtgcgcctcgccacccgcgacgacgtccccagggccgtacgcaccctcgccgccgcgttcgccgactaccccgccacgcgccacaccgtcgatccggaccgccacatcgagcgggtcaccgagctgcaagaactcttcctcacgcgcgtcgggctcgacatcggcaaggtgtgggtcgcggacgacggcgccgcggtggcggtctggaccacgccggagagcgtcgaagcgggggcggtgttcgccgagatcggcccgcgcatggccgagttgagcggttcccggctggccgcgcagcaacagatggaaggcctcctggcgccgcaccggcccaaggagcccgcgtggttcctggccaccgtcggcgtctcgcccgaccaccagggcaagggtctgggcagcgccgtcgtgctccccggagtggaggcggccgagcgcgccggggtgcccgccttcctggagacctccgcgccccgcaacctccccttctacgagcggctcggcttcaccgtcaccgccgacgtcgaggtgcccgaaggaccgcgcacctggtgcatgacccgcaagcccggtgcctga

SEQ ID NO: 9153 - DNA, 2952 bp, synthetic construct
  source 1..2952: mol_type = other DNA
atggactggatttggcgcatccttttccttgtcggcgctgctaccggcgcccattccgaattcggaagcggtacccaccatcaccaccaccatcatcactggagccaccctcagtttgaaaaagactacaaagacgatgacgataagtggtctcatccacagttcgagaagggatcagattacaaggatgatgatgacaaggggtcagattataaagacgacgatgataaagggagcgactacaaggacgacgatgacaaggcctggtcccatccccagttcgagaaaggaggcggatccagcggattcgaagtcttcacactcgaagatttcgttggggactggcgacagacagccggctacaacctggaccaagtccttgaacagggaggtgtgtccagtttgtttcagaatctcggggtgtccgtaactccgatccaaaggattgtcctgagcggtgaaaatgggctgaagatcgacatccatgtcatcatcccgtatgaaggtctgagcggcgaccaaatgggccagatcgaaaaaatttttaaggtggtgtaccctgtggatgatcatcactttaaggtgatcctgcactatggcacactggtaatcgacggggttacgccgaacatgatcgactatttcggacggccgtatgaaggcatcgccgtgttcgacggcaaaaagatcactgtaacagggaccctgtggaacggcaacaaaattatcgacgagcgcctgatcaaccccgacggctccctgctgttccgagtaaccatcaacggagtgaccggctggcggctgtgcgaacgcattctggcgctcgagaagagcagcaacgaggccaccaacatcacccctaagcacaacatgaaggcttttctggacgagctgaaggccgagaatatcaagaagttcctgtacaacttcacgcagatccctcacctggccggcaccgagcagaattttcagctggccaagcagatccagagccagtggaaagagttcggcctggactctgtggaactggcccactacgatgtgctgctgagctaccccaacaagacacaccccaactacatcagcatcatcaacgaggacggcaacgagattttcaacaccagcctgttcgagcctccacctcctggctacgagaacgtgtccgatatcgtgcctccattcagcgctttcagccctcaagggatgcctgagggcgatctggtgtacgtgaactacgccagaaccgaggacttcttcaagctggaacgggacatgaagatcaactgcagcggcaagatcgtgatcgccagatacggcaaggtgttccggggcaacaaagtgaagaacgcccaactggctggcgccaagggcgtgatcctgtattctgaccccgccgactatttcgcccctggcgtgaagtcttaccccgacggatggaatcttcctggcggcggagtgcagagaggcaacatcctgaatctgaacggcgctggcgaccctctgacacctggatatcctgccaacgagtacgcctacagacggggaattgccgaagctgtgggcctgccttctatccctgtgcaccctatcggctactacgacgcccagaaactgctggaaaagatgggcggaagcgcccctcctgactcttcttggagaggctctctgaaggtgccctacaatgtcggcccaggcttcaccggcaacttcagcacccagaaagtgaaaatgcacatccacagcaccaacgaagtgacccggatctacaacgtgatcggcacactgagaggcgccgtggaacccgacagatatgtgatcctcggcggccacagagacagctgggtgttcggaggaatcgaccctcaatctggcgccgctgtggtgcacgaaatcgtgcggtcttttggcaccctgaagaaagaaggctggcggcccagacggaccatcctgtttgcctcttgggacgccgaggaatttggcctgctgggctctacagagtgggccgaagagaacagcagactgctgcaagaaagaggcgtggcctacatcaacgccgacagcagcatcgagggcaactacaccctgagagtggactgcacccctctgatgtacagcctggtgcacaacctgaccaaagagctgaagtcccctgacgagggctttgagggcaagagcctgtacgagagctggaccaagaagtccccatctcctgagttcagcggaatgccccggatcagcaagctcggctccggcaatgatttcgaggtgttcttccagcggctgggaatcgcttctggcagagccagatacaccaagaactgggagacaaacaagttctccggctatcccctgtaccacagcgtgtacgagacatacgagctggtggaaaagttctacgaccccatgttcaagtaccacctgacagtggcccaagtgcgcggaggcatggtgttcgagctggccaatagcatcgtgctgcccttcgactgcagagactatgccgtggtgctgcggaagtacgccgacaaaatctacagcatcagcatgaagcacccgcaagagatgaagacctacagcgtgtccttcgactccctgttcagcgccgtgaagaacttcaccgagatcgccagcaagttcagcgagcggctgcaggacttcgacaagagcaaccctatcgtgctgaggatgatgaacgaccagctgatgttcctggaacgcgccttcatcgacccactgggactgcccgatagacccttctaccggcacgtgatctatgcccctagcagccacaacaaatacgccggcgagagcttccccggcatctacgatgccctgttcgacatcgagagcaaggtggaccctagcaaagcctggggcgaagtgaagcggcaaatctacgtggccgcattcacagtgcaggccgctgccgaaacactgtctgaagtggcttaa
